United States Patent Application Publication US 2026/0271966 A1 - sequence listing, part 4

SEQ ID NO: 5 - DNA, 4089676 bp, Bacillus subtilis (residues 2,044,839-4,089,676 of 4,089,676)
  source 1..4089676: mol_type = genomic DNA; strain = Strain 105 ELA191105 ATCC PTA 126786
gatcttagagttagagttgaatatacagggactgtttacttaggacaataataaatgaggggcgactagtcccttatcttatttttagttaaaaactatcttttattcaatctctatattcaacccagttgatctaactttgatttccctcatctctccaatctgtggcatatataaatgtttcttttcattagaaacaatttcacccttccaacaaccgttttgcacaaaggattttgtcccgattggtaaagtttgaagatctgcgttctctatgtattctccctcctctctataaatatctccttgttcagaaatcctccttttcgaaactttaatgtcgattttgtaaagtgaattttcatcctcaatcattaatttatatagccaatcagttatttttgattgctcttcactaccgttaaccatatcgaaaatcttcctgtacatgtcattcctcttcttttgaaaaatacttgtctcacctctttaatagttaaagtttcttgattttgcacttttccactcattaactatccacttcatatgtattcattaatttaatgataaaaccacgattttaatttaactttaatatgcaccatcttgagaaaatcccctttaattggtaaactcatacttaactttttatatacaagtgggtgttgccttgaataaaacaatcggaattgttggattaattatcagcatactagtgcaaactttttcggccgatgaatcgctatcgcataagattgctacggctttgttattggtatcaataatgatttataattttgaacatgctaaggattattctaaaaagtcacttgttattttaggagttacctttattcttttgatgctaggagtttatcaactgctctcatttaccagcgattactttgaaaagcttaatgtgaattttagatataccctcttatttgaaatagcattaattattgcattggtaacgattgcagtaaatgtaatgaagtacattgcgaatcggttaaggaaatcgactaatggtaaagagttatagctctttgccttttttatgctaaatgcttctttctatgcggtcttttatgtatgaaatcaaatgctaaatcaacttttctctggttccctttcctctgttactcgctgagtaacaacaataagttgaccgttttcttgacgatcaatactcttaactgaatatcctttagaaccgtaatattctccgataatctcatcaacgtggttactaagcagattcctctttatcacctgaaaaacctccacttattttatttttattctttattttttttatgatttcatcctataatccatctctccatttgccctctcctctatcacgacattaaccgacacacaatttccatatatatgggagtaatttcgctatttccccaacagataaatccatataatgtaattgtaagaaaaaattataagaatgggggatttacatgagttacaaaaaagtaataacaggtgttgcattatctgtaggtttacttgtttcagcatctccagcgttcgctgcaagtactagtcccgataaggaaatagtaaatgttgcaagtgatgattttaaagctcaagctatcaaatgggatctacctagtactactggtatttttgccaatacctttgaaaaagacggtatccgctggtatttaaaaggtattacaaaagtctcggaaggaaattggattggccactatgaaggtgtacgaatataagatcaaaatgggggggcatctagctccctttttaaattcatagtttgccagctctatctggttaaagtaatccttttaaacatagttcaaaagcacataccaattttgtatacatccccattaatacatctccctctctttaaaacagtctttttatcaagtgtagtgctactcataaacaacaaagacattatgatcatcaacaaacatttcgctgccatcagacaagtgtatccaaaaagcctcctctggttcatctctatagtcataaattgcgactacctttgtatttgattcttcactcactgactttctgacagttatttttatattatcttcaggcaaaataattgatttaatcattcacttcaatccaatcaaggtttgtattgcaccgttgtgcttcaagtaacatctagtcacaagattgaaccttattcgttaatacacttggtcccaacttttctgttctagcattagaaagacgcacttgaactttaacattcttcatttcggctgtaattgagtcaatccttccagcccaactaggactgtcttcaggtgtaggataaagtttaaatcgccaactaatctcacctggtttagaagcaaaaccttcgtaggtatcgtaatttccatatgaagatggttccggaagatgaacagcaagaatacttatattggttcttggagcactaggcggatttaattgcaccttataaattaatgccacgccttttacatttctaaggctctgatcaacaggttccattattacactacaaggcattgtacttgcttttacttgaattggataggcaacagcagcagccaataaggatataaccaaaataaatcgtctcatggagagttcctcatatttttttggttaatttcccttatttctggatcgattattcatatgtatttgatctggacttcaattttattttgatttaatttcaacagttaaactgtctggatagttttttaaatcaagtgcgtttacatgacagtgacctacattttcttctttatcaacgtaattatagaagaacttttccccattattgatgatgacttcgccatgatgtatgtactccatctctgatcccttgtaccaagttaccttaacctttgtgctaggtttgattttatttaaatcaaatactgttatttcttttagcaagttcatttttttaacctcctcttctcttttacttttaatctaattccctcatgtcctcctgctgctcaatataacttttaaagtcctcccattccctatcaatttctttaatattcctagcaatataggtttctgtaatgtctggatcaaccaacttttgaagagaaagttggtacataaattcaatctttgatactgtttctagaaatgactgggcataactttttgctctatttaagcgatattgactcattccatgttttgattcctttattattctcactcccttttaatcacattaaaatgcagcttttatttagacttcatcagcttgtctaatagtgtctaacaactctttcttcttgaaatatgtctttttccaaacgatccacttccttttgcaattcagtagcagcagcattcttcagaatccattctcctactccacagacttccttttgttctttctcaaacgtttttatatgttgatcttcgaacctaacccttactcttgttccgttttcaaattcattattaaaagcagctgctttcttttattcttcaagctgcttaatccttttgttgttgttaaatgagttacttacaatatttcctgattcacgagtagtacttataattaataatggaaagcttatatcacctttaggtcttaaaggtacgttgaggttttgactcggttagtaacttttggagaggagttgctgaccatctttttcattaaattaattgcatacagaaatttaataatggaggaatttagattgctgcttaatgacagagattgctgcttaatgacagagaacgttttttgcttgagtatcttcttgtttctaatcggatcaaatcgtcgtttgataccttctaatatactcactatctctgtcttttcttcttcaagaaaagctccaagaaaagatccttttgaaaattctggtttaaaggatctaggactatctatgagctcaccatttgatacaaatatactcagtcttatgtccttcgatgtcttacggaagaactgtttgataaggctagagctctacatagaaatatcggtgagcgtgtttactttttaaagtctgacgtctgcattttgtatcatgagtggatatcgtgacatccatttgctgcgacttcttttcaaatgaaatgaccaccgcaaaagaacagattagcaagcggttgtactataataaacacctaatggatacttattttaaaggaaagattgaagagcataatgtcattacggattgcgacattgataaggtgttacataagatgtacttaagatttggattcagagagtataaacgaaacaattatgagcatgtctttgatcttttgggtatataataagtcttatactgctttttagtaacaaatattggatttcgagtttttttcggctgactcacaaattcgaatgaaaatcaagggcaaaattaaaaaaatgaataattaagagggtgtataaggcttaatattattaatcgttaccgtaacagcaaaaaatgaatcgaagacttatttttatgcaaattggcgaatatcaataacgtcttagtcataatacttaataacctaaagcaaaggctgaatttatgaaagggttattttagatgggtacatataatagaagaaactcgtcacagataaatcatttagatggacggtgaggaacttaaataagctgcagaaggaagatatgaagttgttcaatatctccttaaaacaaccactttcccctactcccgcttatgttttacgatcgtttaccccctattcactaattaaagtatcaaaaatccttatgtttactgtcttttttagctcattataaatttttacgataagcatgttattcgtgtacgatatacgacttgactgtaattggtgacgatttaacagagatatttaatgcacttctaacttttttaactgcaatgggaatcattgttgacccaacaactcaaggtatttctgatagtgaacaagcaatggattatgataaaccccctccccttctcttaattgaggagggtatttttttcgtaatgaaaaaattgcagaaaactttacatccttttacaattttttcaatgactatgttatgattgttttcgagagatttttgaaattttcagaaagaggggtttggatgagtaagatcgcttcagaagttgtcgctactacactgaatgactggtacattgctataaaaaagcaaaaggttgatgagtcaataaaatattattcagagataaagaaactttttgatgaaatggaagaagatcaagaagttcttgcgtattatagtttattagaagaaagacataaaatgttgctacattcctcacgaggagaacctttgcaaaagcacacctattttactgaagacaatcaaaacttcattaaaaaaacaaatgataaattagaatacaacttttatctatttgaagcaatgtatgaggcatacaacaaaaactatgatcgagcaattaacttatatggattagctgagaaaaagcttgcagaaattccagacgaaattgaagcagctgaattttactctaaagtctcttacttatacactcttgttaaacaaagcattgtggcacaacattatataaaaaatgcaatttcgatatataagcgacaccctgattacaaatgcaaacttgctacatcaacaatgattgcagctgcgaactatgctgatatgaaacgatttgaggaagcagaaaaatattacttagaagcaattgatattgcaaaagaaacaaaagatgaatttttgaaagctcaattatttcacaatcttagcatcgtttattctgattggaataaacctgataaatgcatcgaatctcttgaaaaagcaataggaaatgaatcttggttacattcaatttattatataaattctttattcatgataattaaagaactctttaaaattgacgaaaaaatgaaagccattaatttttacaataaagcacaggaaagactcatattaatggagaataaagtatacgaagccaaaattagcatcttatacaacctttattgtggtgaattaaaaaataatttcaataattgtattagtaatattgagtttttaaagcaacaaaatgaacttgaaagtgtagatgaattgtcctacatagctgcaaaaaggtttgaatcaataggtgcttttgaagaagcaacgagctttttcaatgcgaaaatttgggctgaacagaaaatgaatcaggtggagggaatcttatgaaaaaacttgtgctttgcgtatctattttagctgtgattttaagtggagtagctttaacgcaattgagtacagattcaccatctaacatccaggtagctgaaaggcctgtcggaggttaaaaaaggttgattaattaatttagccctactcatacacttgagtgggcttttattttatgatttatgtccaccagtcaacccagctctgtgaagcgctgtacctgcaaacgtaactgagatatttctcactgttttgcccgagtaaaacttattaaagaacatcaagcaacacttataaatatccatcgtgatatttgtgggaaaatcaattgttttggatcgatgaaatccaccaccaagctcatctttactgtaaccaattccaaggctgatcgttcgaccaactttattatgtgtacatgcccttcttgcgacttcctcacaaatttccaaaagaacagccttaatctcttctctccttgtataatccctcagtaaaatctgactcttatcaaaactaatctgaccttgcatcaactgagcacctatttctgataaatcaattccatgcgcatgatagtacaactggtttcccattattccgaacttcttttcaagcagctctaaaggaaatttagctaactggcctacagttgatatacccatccgattcaggtttctttccatcctccctcctattccccatattttagacagtgaaccttccagagtttatttggcacatcttcatatctccaacgtgcaataccactctttgttttcttactctccaggtcaagcgcaagcttactaagcaacatattgtcaccaattccaactgtgcacatcaaaccaaattctctccacatgctgctttggattgctttggccatttcttcaggattctcttttcctgcatctaaaaaagattaatcaattgaatacgtgtggacacatttttcaggaacaaatctgtaaaacagctttgtaatctcagttgaaactctgatgaaaagcttcatttgtggatttacaatgtatattcttggatcttcaggtatctcaaatagtctcgatcctgttttgattccaaaatcttttttaagtgcaggagatgcggctaatactacacttacctgtctctcgatatttcttacaacagccgatacagaagtataaaacacaaagtatattcttacgtagaaattgtgagtaatcaatcattgtatgtaactccttgttatatatactgtgttgttatgttgatctttaacgtgaagcttgtgttgttcaaaattaatgtaatgaactcttccggcggcattttcaaacaaatccatagttgtaaagtttgaatttcaaaatttaagtgcttcagaaacgagaacgtccatcatctcaatttttgatccatcaatcaaatcttgtttaagctgtattaaatgttctagcatcattgatgtccattgattgttcctcgatccctaaacatatcgactcactccttgattgatctaatatcaacagaactaatgttccttattcaatgcagataagaacaaacgttcgatgtaaatgttggtaataaaatataaaggtcaataatgatatccgtagtattaataaaggagagattcttttcgacgagggagagtgtgatggtgaatgaagaagaggttaattggatttttggtcttagttcctgctttgattatgtcgggtataactttaatcgaatcaaacaaaaagacccctgtagaagttttagaaagtgcttgggatgaatttgggttatttagttttgaaattggaataacagatccggcaattacaataggcatggatcaaaccaaaagtgaagcaaaacttcgtgaatatttaaaagataatctgtctagagaagccaaggaaaaatataagatttatatattcaaggacgatattgttaagcttgagaaagagcatcaagaatatttgcaagaaaataatctcaataagtaaaacgcccagcacttattgagctgggcactgtttcatatttaaattgaatttttataagcattaatagcttcgtttcgcaacaacatattatttttgttaaccatgcctatgttgtaagcttttttgataatatctaatacctgtgaatctaatgcagagagattacctcccggattaaatcttgatttccaataatctaaagacttatttaggtcaagtgagctttttttgttctcgggtttaactacttcatttttctcaagtttttcacagaattcactaaaactaattgatgaaagagtaggattatcccctccatacccttctgtagccaaactgcaaaatgctaagaatttcggatcataaataagatcgcttgagtttacattcatcacagataatcacaatcctctcagagctttttataattgtattaccttttccatttttacacatgttaaatatcgacaatccctcaaatcatttaataaggttatgtcaaattttaatgttgataaatacgcaaaaataaaaggaaaccatagttccaagtaccttttaggctttctaaaccaatttttacagcgtttagtccctttttgacaacagttgtgtttgaacctttttctgtcgtgcttttataagcatttgaaagtttactaaaagttgactctaaagatttaatggacaaatcttgaatttcttggctaacaatcttcatttacaattctcacttttcgttttaaaaacaacacctactcaatagttgaatttaggactacgccttgaattttgcgattcgcaaactatcatatcagctacagctttaaatgtttttcttagcttcaccatttgtgaccttagtcccttgtactctttggctcttttatccgcttcagagagcaatgaatcagcttcaaataccttcatttcattctcctttcaagcctactctatgtaaatttcaccacaattatttgcttgaataacagaaaaagacagccagaactgactgtcttatacatcgtgcgatcgtgttctataataattttctgcggtatagtagcaccattcccaaaaagttgccccattggattctatataccgatctagaaatatctcaaaatttaaatttaatggtgtatattcccctatttctaatataaaaagatagttgggatcccctttatccaatttatctttgtcgatcatcaaatggcacccttctaataagtgaccaattgggataccattgatgccttcaaacaaatcctcatattttaattcttcttcaatctcttcaaggctaaataaataaagtcctccacctatattctccccatcagaaagaatttcaaaaattttcgcaccgttatgtagtgtcatgaacttctgataatcctctggaagggtaatctgatgtttagcttcaaaactttgaatgtcgttaagggttgctttgtcctgtgaaaatgtaacaaggaactccatgatatctccttcagaacaaaacaattgaatggctcctttttcgtctaaaagacttttcaagccatttacagtcttatgaacaaagttagtcacatacatcacccctttatttccttttaacaataacctttcaaattccaaaagatgtgaacagatcgtgataggtgctcttttcagtgaatataatgcaataaattctaaaaagaggtgcctctaaaaattgaattctctaatgaatgatgacatggtaaagatcattagaaatggccttagcgcatcccagcatccaaagcatattcttgttgtaggagctggattgtccgggcttgtatcagcatcattgctgaaaaatgccggtcacagagtaacgattctcgaagcgagcggcagagcgggcggccgtgtctgcactttgagagctccctttagtgatgatttgtattttaacgctggcccgatgcgcataccgaataaccattcgttaaccttagaatatatcaaaaaattcaaattgccaacaaatgtatttctcaacagaaccccgatggacatcatttatgcaaatggaatcaaaacacgtctccaagtttttgaacgagctcctggaatattgagatacccagttgcaccaaatgaacaagggaaaacatctgaagagctgatgctttctttactgcagcctattctaaattttatcaatcaaaatccagcgagaaattggcggattgtcgaagaacaatacaaaaatcattcgttaagctcttttttaaacacgtatttttcatatggcgcgatcgatatgatcggtgtacttttggatatggaagcgtatatggggatgtcccttgttgaagtattgcgggaatctatctttttttcatcgcccgctcacttctatgagataactggcggcatggatctgctgcctcacgcgttgcttcctcaattaaaaacaaacattctataccatcaaaaaatgatgaaaatttctcaggggaaaaatcgtgttacgatccattgtcagcatcaacaaacggcagaattcacatcattcacagctgatctcgctattgtaaccattcctttttcaacattgcgatttgtaaaagtcgaaccataccattcattctcttactataaacgaagggcaatccgtgagctaaactatatcagtgcaacaaaaatcggcatagagtttaaaagccgattttgggaaaaagccgggcagcgcggcggcaaatctattactgatctaccgattcgtttttcgtattatccaagcagaaatattggagcaaatggacatgccgtcattctggcaagttatacttgggctgatgaggcactgatatgggacagtctttcagaaggagagcgaatccagtatactttactgaatttatctgaaatctatggtgatattgtgtggtctgaatttgtgtctggcacttcttttagctggagccagtacccgtattctgcggggggatttacagctttcgaaccaggacaagaattagagctgtatccctatattcctgtccctgagggcagagttcatttcgccggagaacacgcctcactcactcatgcgtggatgcaaggcgcgattgaatctggaatacgtgttgcttatgaggtcaatcgcttaccttagatcatgctcacatcttgttaaaactggttgatataaaaagaagtgaagaatttatactcctttgtttaaaagattaattcaaatatgggatgtctcaacattcagttctttattatttttatacacgttttgaatgcggacctcccttttcttccataatcattaataaatacccaaccatagaaaacgttttaattaaccatcgggcgaactttctttcactgtataacgattcttaatgttgcttttttatcctttacttgtcctctctttttttcattgacttacatttcttgaaaaccagtataaatcctaaaggaattttgtaacaaatacagaattggaaagataagcgccaaaagaaatgctaactccttatctcaaagacaaaactgcgcttatattaaaagaaagaggtgtctttagaatggttcattttaaaaactgccctgatccttctctaaacgccaattctcagtctcaccccgaattttcatccgaattagaacatattaagacaagaatgcaaaactttattaagcactcggttacagcccaaaatatcgaagttactgacgcaagggtgacggccgaaggagaggtcacctctcttttaaaagaacgtctcgacaaggaatattataggcttttatctaaaatcacccgggaagtaaatgtggctgacttcggcgctgttccagatggaagagacaatactgaagcttttcgaaaagcaatcgggaatggccgagtcaaagtacatgttccagcgggagaatacctcgttcaagggattaaacttccatcttggacaacaattgttggacaaggtaaagggatcacagtgattaaattgcatgaagacactccagcgcatgaatgggtgattacaaatgatgattatcaaaatggaaatcgcaatatttttgtccaaggaatgtcattagactggaatccaagtagacaatgcggtgtgagaaatccagggggacagttctccagttgtttaacttttgctaaggttgaatatgggtggatcaaagatgtggaagcgattaacgcaggtcttcatggtattgatattacatcgccaacgtatgaccatttgcctgataccgattggacaaaagacggatcaagatatatttggatcgataactgtgtgacatatggttcaggagacgacggcattaccacccattatagcgaatacatctttatttcaaactgccattcaggaaatccgcggggaacagaatttgctgaaggtgtttcaaactccaacggaatagaaattgacgacggctctaggcatgtgtggcttttgaataactttacaagcggcaacatccgcggagttgaagtaaaagcccatgaactgtggccagcctctcaaaacgtccatatcataggccatatttcttatcgcgatgttcgtgcatttgatcttcgtcatattggtcaccatcaaattacagatcctgaaagcacaacagcatacgatgtcacactcattgattgttcagcagttgaaccagttttcaactcgctttacgatgctgtgaccccaagagcgctggttatttcggcatataaaaacgttaatgtaagcggattcacagcgattggtgatccagactatgattataaagaaaaccctgtcgtagccttgcaatatcgcagccaaaatataaccattaatggtattaaaattcgcggttttaaaaaagccggtgttgatattaatttatcaggcggatcaaataaaactgattatattaaaatttcaaattttgatatttataaatctgctccaaaaggaatttcaatcggtggaggcctctacaatgtcaatattctaaatggaacgatgattactgacaatgggacagttgcaattcagtcccccaataatcaggccacaattctcggtgtacaatcagaaggttatagtgtggcagcctcaatcaaaggccaaacataccaacaagttccaatcaatttgaaaggaggcatacagcttgcaacgacctctggctttgccgttaaccaaacaagcgcagttatagcaggtaccggcgacattacggcccgcggagaaagaaatgcggtcattagctcttctggaggctccagtactgaaggctctcgcgcattaatcgcttcttcaaataacgcacatattagaggaaaccaagcgtcaagaacaatactgtcttctgaaaatattatacttgaggaaccatacaccgtggcaggaggtcatcaatcaataaagtggcttcttgactctgttcggggaaacgggacgtttgccggtgcaatcagttcttctttaggtggatatggagagtattttgagagttcaactggacagttaatccatactggtacaatcgtgactttaagaggtgaaaaaattgtgcccgcgaatgttggagattatatgcttggcgttatttcagaaacttcagctttcatttcaggagcctccagtttcgtctggcagggccgttatttgacaaatgagttcggcggatttatttatgaaacggtgactgatgaggaaagcggtgaactcatacgtgttcccaaacaaaatccagactacgatacagcgctggaggcaaattatcattcacgggcagcaagagacgaatggcacgttgtagggttggttggccaacattatgtgcgtattgacgaaactgtcaatcaaggagattatcttacggcacataatggaataggaacaaaagccactgaaggaagctggaaagtaatgaaaataacctctgcttacacatcagaaaaagggtatggtatcgctctaaccgtcatcaaatagtggatacgccgaccagttcaatatatgtttatccaaataattagatctcttttctaggttctttattccttgtatgttattatcaattttcaatatctaccaaaacacccctaatatactatcgtaattaacttatattataatcaaaaaaattttgacagctgttccttctcgttattcatgaaagttgctattgaaatgagtaaatggatatcatattagacttctatagcaaatacaccatatatatcctttaagtatttacaaattgaaaatgtttcatgaggcttattaaaagtattgttcttttatcatctgtaagtcgatacaaattgcattaagatcacacctaaatcacactgagttttttcttacaaaaaaatgaaaaccctttccattctaaattcatttcaccgttactaaaagtaatccttgcattccttcgcccttcatgctatattcatatagcgatgagctgaattgtgtaagtcgatgtacatgcctttacggcacacacgaatgtggcgtgtggtgcatcgcctcaatacgcaaagacgtttgccttaggcaaacgtcttttttgtgttatccgatttttgtgccgtttgaaacaggctgatccggctgcaaaaggacgacatcgccctggccgggtatgccgccgaggaccaagacttccgatttaaatccggcgatccggcggggcggaaagttcacgactgctatgacttgcttgttgacgagaccttccggctggtaacgcttcgtgatctgcgcgctcgattgttttatgccgatttctgtcccaaaatctattacaagcttgattgccggtactcttgcttcaggaaattcttccgcttttacaattgttcccgttctgatatccaatttctcaaagtcttcaataactgccatatcaataactcctttttctcctattgtaaaggagatatacaatattcttttaactaaagagccatcattttttatccgaatataaggtgtttcgatacaggcggggcggcattcctgtgcttttcgtgaaccatcttgtaaaagaagaaaggttttgaaagcccagcgcctcgctcacgacggtaaggttttcatttctctccatcagcattcgttttgcttcctcaaggcgaaggtcggcaatatagttctgcggggacttccctgtctgttttttgaaccagcttgaatagtaagctgggtgataatgctcgatttctgccagcttcttaatcgtcagccgctcaaataaatggctgtgaatgtatgcaattgaggcatagctatgggattgaagcttttcttttatgtattgtactagcatatgaagcgagttggctgttccggcctttgcttcctctgtcagcaagtacctgatcgaagaccagaaaggatcgagtgcagcttcaattcccgatcctgcacgatactcatcaattttcattgcgtgaagcggaacatccagtacaagacattcatttcttccgatagaacggaagcgatgctcgcactgcggcggaatatataaaaaatgatccggatttaatttcacctggcgcccctcagtctcaagatctatactcccttcaagcggaaaaagaaattggctgtacgcatgcttatgtgaatgataaaggcgtgtgtatgtccgtttttcgcaaatcatctcttgaagcgaatccatcagcaacccccttcctttggtcatcttttaatccggtaatggtgttccgatataggcgaaaatccgattttttcatataaagaaactgccgccagattttctttcatcacttgtaaaaacatgcgttccgctccgttgttttttgcccattcagtcaacatcctgatcacttgggttcctgccccttttcctctgtgctcctcagctacaacgatattactaagtccgccataaccatcaatgacagaaaccgtgccaagcgctgtcaggctttctttgtcatacatcttgaaaaaagttttacacggcggcatgcgttcgaatatgtgtttgtaacctttgtgacgttcgggtgaaaacccttctaattgaataaattcatctatccaaacagatgatggctcttgttcccacttgtatgtaaatcggctgttgtcatttgttcggctcataattgaccggcacaacgctgtcatctggaagcactcgtctaccttttcataacggctgtctgccaatgcgtcatcaagccctttcggtgatgcgttgctaatatgaaaacaaacaggtaagcctaaactttgataaaaaagttcggcctctagctgaaaatccccttcaggcatatccgcagacgtccatacgctatttgcccttttggttacgccaaaattcgctctgagaagccatttccctatgcttttttgaaaataagccggccatgaagctgccgctaatcgttcaatcttgcgaatgtcatccattgcataatgcctctcccctatgtatactcccttgatattatacaatattcagaaatataagacatccatttatttgtttacataatatttttattgtttattaataatcctgacaaaaatgtccgaattgaaaatgacaggctttctaaaatgtcctcctcacgttcaaatgcttcttttgcgattaaaacagtaaagccatgcagcagacttctgagcccccttgtcgcatgaatggcagtcttttcacttgcatagccgttttcaatgagcagcttcgtcacaagacagacaatttggtcagagacgatttccgtccgtttgtcgtgaaccttaagaagagccgcttcataatatccgggattttcaattgcaaaatcaacatatgcatgagctaaagaaagcatcgcggaatctccctttcgttcggttacggagtccgccatttgatcaaaaagctttgtcagtcctctgacagcaagttctgctctgatcgcttgcagcccgttgatatggttatacaatgacggggggcgaacattcatttttttagaaagtgcggcaagtgagacaccatttaccccttcctgatcggcaatctctgctgcagcgtctacaatcattttttgggtcaaacctattctcggtgacatgctcatcatcctttctttgctttttggatcgcctgtctcatccgctctgaaggtgatcgcaggaattttccatgtccgacagcgagacaggaaggcgccttatctgcgagcaattgtgcacttttgatggcctcctccttattccatgtggcgaaagcgggaaaaggaaacgtccattttatctggcctgatacagcgattcctccgtgcaactgaaacgcatctcctgctattaaagtgccgtttcttgtatcaagaaatgacatgctgcccggtgtatggcccggtgttggaatggcaagcagagaaccaattgtttcaccgcccgtcagcagttggtgaggctttgtttgtatgtgtttcggaatacctccttttataggcgtctgcggctcatcttgccgcaaggatgtgtcaccttggagcaagaatgaatcccgttccgagatcatgacctttgcatgcggaaatgtttgtgccaatgtatccagtgatccgacatggtccccatgtgcatgagtcagtaaaatatgctgaagcggttttccaagctgattcacagcttgaataatccctttatagctgcctggcagtgcggcatcaataagggtgacttcgttttcttcctctactaaatagcaattaaccggaaacaatgctggaaaaaaagtcagctgccaaaccgtttggtactgagtcattctcatctttttattcctcctaacaaaactaatggcgttagttttattattaactaacaccattagtttttcaagagtttattatttttttatcgctacataaatgttaacttgtgctcgctgtggcactgcggcactttgatcatacatctcaaaatcacctgtaaacgtgcgcagatgccgcttatcccaagtccaaatttccttccacgtttcaagcacaatctcttcaataggaccgattctggaagtgaaaacggcgtaagcggaagccggcaaatcaatgttttcatatggtcccggaagaatgtcgtcgtattcctgaaacgttccgactgaaaacgtataaaacccattcgtctcttgttcataattcgaatataaggcaataatgcttttgtctttttcagcctgtgataaaagagcgctcatatcctgcttccagaattggtcccacagtgccggaatcctcctttcttccgtcatttccagtgcgttgcttgtccgttgtgacagtccggcaaatcgtttccggtctaagtgtgttatatgtgaaaagcccatacgatctcctcctttttttaagattatagacaaagaaacctgacagcagtgtgtcaggtttcatatattttttgcatgtgatgaatggtttcttttactttatcccgtatatgaagaggctgcagaacctcaatatcctttccgaactggagcaaaaaaccgatcagccatggatcttctggaagtgaaatcactgcccggcagatttcatcttcctcacaacagtgaaggacatcatatccgaaccattcacctatgcgctgacgtgctgacggctgaacaagaataaccaattcagttaaacggtccttttggtaccaactcttatcccatggcaaagtgtccagctgaatgtcttttctgataaatgtctgatgtaagatagccagatctttcatccggttcagtttaaaaaagcgaaaatcatttcttaccaggcagtaggcatataaataccagtgccccgccttgcaaaccaatgtataaggttcagtttcccgaagtagtgtttccccgcttgcgcttgtatatgtaaaagatatcgttgacaaccgatcgatggcagcgctgattttctcgcgcagcgtcttttgatcctcagtatggccccaagccgtcatgtcaataaaccatttttctgtttggtgcttaaatgcttgagtagattgttcaggtataaggtgtttgattttttgataggctgtgctgtgagaaacgggttcatacatagatgaaacgctttgcaaagcagaagcaattgcaaacaattcctcctccttcagccactctctttcaagccgatacgtttccatgatgccaattccgcccccggaaccctgtgaggtcacaatcggaataccagccctattgatcgtctcaatatcacggtaaattgttctgacagatacttcaaacagctcagcaagctctgcagcctgcacttgttttttgctgatcaataacacaaccatcgctaacaaacgttccagtttcattctgcgcaccttttcttcttgtattttccaacaaaacaatcataacattttgataaagcttgggcatatctattatgcggcggaatacacctcgcatatgctatgaaaaaaggggtttccccttcttttttgtgttcagtatttatttcagctactatttccgaccggataagcatacacttctcaacggaggggatttcacatcatgcatcttacacttcagagcgtttatcctgccatgatcatcatcttttttctgtataaaaaaattaaaaggtccatcggataccagccgctgaagccccgctggctgttcacccgtatcattcttttctcgctgtttgcttttggactttcaatcttcagcgccattcacccttttttatatggatatctcattttgggcattcttggcggatggctccttgtctttttcgctaagaaaaacatctcttttgaaaaacgcagaggaaagatctattttcggactcatatttgggtagaaatgattctcctaaccttattcctgtcaagatttctatatcgagtgacagagctttatcttacctcgcctgatctaaacagccttggatcttacggtcagtcaatcggaacggaccctctgacaataggcgtcttttttctgatagccgtttattatatcggtttttcttcttttgtcatcaagctcagcagaaacgaactcgaacagcacggacacaataaagaaaaagacatccttgcccgctagcagcgagttaagcaaggatgtctttttcaatcatgctgcgtatgatggatcatttgctgaagaacatctaaaacatgttcatcctccggagagtaataaatcgatgttccttctctgcgcgatttgacaagccgaagatttttcaaaaatctaagctggtgggacacagtggattgcagtaaattcagcttttctgcaattccgtttactgcatgctcaccctgggacaataaatggagaattctgattcgggtaggatcagaaagcgctttgaatgtttgcgcgactagaaacagcgtctcctcgtccagatcagcagccgattgttccgtttctctaaattcagtcatatgtatcacctttctttattcatagttttatcttataacaaatgcgcttgagtgcaaaccagcctgcttgtattccatttcaatctcatagtttaaatttatgtttcaaatcaggtttttacttggtctgatataccgtcttatgtcataataaaaaaggtcatactgctccaaacattgagggtgaaacacagtgaagaaaaagagaaaaggctgtttcgctgctgcgggttttatgatgatttttgtctttgtcatcgcctcttttttattggtcctgctttttttcaaccgggatttaatcaaaaaacttccgatcgatacgaaaacgattgttttggaacgtttaaccgattacaaacccttggtggaagaagagcttgaaagccaaggactctctaattatacatcactcatattaggcatgatgtatcaggagtcaaaaggaaaaggcaatgatcccatgcagtcctctgaatctctggggttaaaacgcaatgagataacagaccctcaactcagtgttaaacaaggcatcaagcaatttaccctcatgtacaagaccggtaaggaaaaaggcgtggatttggataccattattcaaagctacaacatgggggcaggttacattgattttgtagctgaacatggaggaacgcatactgaggaattggcaaaacaatactccgagcagcaagtcaaaaaaaatcctgacctgtatacttgcgggggaaatgcgaaaaatttccgctatccgtattgctacggtgattatacgtatgcagaaaaagtaaaagaaaaaacaaaaactgttgaagaatctttgcaggttgcaacacttgaaaccatggaatccaaggctcatgaataagagtctatcaatttactgacaaaagcccaaaaatgaatttgggcttttgccatgtttacacgtaaaaaaagccatactgagtatggcttttaataatacggtgaaatcatcaaatatacaataacgcctgtaaggcttacatacagccatagaggcattgtccatctcgcaatttttttatggcgctccacctgcatgctgaagcctctgatcagcgtaaacagcgcaagcggcacaataattgcagaaaggcagatatgtgtaattaaaataaagaaataaatcgggcgcataataccttctccgccatagagcgtgttttccgcaatcgagtggtacgtcacatagcaaatcaaaaatagtaatgttgttgtgaacgcagccaaaataaagcgtttgtgagctttgatatttttctgtttaatcataatcagcgcggccaataagaagataaacgtaaagctattgaatatcgcattcagcattggcaaaatgtgaatattcgcatggctgaactgatctaatttaggcataaaaaacagcactgcgattaaaccgttaatcagaactgtcagcgtaaggacaatccccgtgtaatttttcggtttattttctgtttggttcatttggtgacctctcctaatttgtactggctatccaaatcgtatgcaaattcaaagaagatgtcaacggtttcgattgcttcgtcagaaattagacacacttcaaaggccggaggctattagccccggcctgttaggtttacgcctcttttatcaaatgttcaatgaccttatgttcattttcattcagcaggttcttttgaattttcgaatgaatgggtttattcatatgctgatccaagatatcggccgtttctttatccccggcaataaccattcgttcccatcttttcgcggcagctttttgatcaaggctggcagccagccgcttatacagtctcgattggttctctgttacatgttccctcatccggttctcttcaaatggtggcgctttgtctacagcggaatggctattcttccaagactcattgatcatatcatactcataacgctccaccgcctcaatttttcctaaaacggtttcaataattttcacttcatgctgctgagttaaaataaacgccgtacttgggtatgcctggcgcaaacccttcagctgatccaggacagctgtttcttcccagtaaaatcttgtatctacagggacttgaagcttaataggctcccatatgccgctgtcggaaacaaaaaacacgagactgcggggcatgtcttttcccattgcattcaagtattgattcattttagccctgattccatccagacacttttcctcctctggatcactagctgccaaatactcttttaatcggctgaatcctgactttagggcaatcttccattctcccccctgctgctctggatctctcatgtctgtattgagatacagagagagaattttatccggcggttccaattggacatactgtaatttgttaatcaatgaatcaatcgccattccgattcctcctttttcacaggttagttttctttttcctctcttaaaaacgatcaaacctgactttccgctaatttctagtaataatggaattgttgtttacaatacgcctctcttctaatacaattggtaactgtgtttctaagctgatttttgaaaggagtttgatcttgtttactattaaagaaaaaaatcgtcaagagcttgaagaagaattaaatgatttagaatttcaaatttatcgcatgcaggagaatatgaaggatttatctaaagatgccaaagtgcttggtattgatcaatcgaaacatgatgagtggatgattgtttcctcgattgatgatggccaaacatgcaaaattatgctaactgattgtaaaacggcttaccgaggaaaaggctgtttttcacttgtagcgtcttacaaggacgatgccattcatataggcgatataaaaggccctccgaatcacgggtttggttccatttgcatgaaatatttaaaagatatagcaagagaccacaatataccgaaagtcacaggagacatcgccaaacgggattggaatcatgtagaccggctgattcacttttatgaaaaacatcaattcaaagtatgtatcgatcatgatacccaatccggcagcattaagtgggttgatttgtaaaaaagtctggaagaaagagccaagatatgctgtaatggtaaaaaaccattgatggagggttctatgtacgcctcaaaactgaaaaagggagacgaaatccggatcgtgtctcccgcgaccagcatgtctatattatcaaatgaagcaaaaatccgagcacttaggttatcgggtaaccatcgctgaacacgcaaatgaatgtaatgaatttgattcatcctctatcgagtcaagagtccatgatctgcacgctgccttttttgatccaggcgtcaaagcgattttaacgacactcggagggtttaattcaaatcagctgctgcgttatcttgattacgagaaaatcaaacggcatccaaaaattctgtgcggctattccgatataaccgctctttgcaacgcaatttatcgaaaaacgggtcttgttacgtattcaggcccccacttctcaacatttgcaatgaaaaaagggcttgattatacacaagagtattttctttcttgctgcgcttcggacgacccgtttgaaattcttccttcaagtgagtggagcgatgaccgctggtttttggatcaagaaaacaggcgtttttatcctaataacggccctgttgtaatccaagaaggttatgcggaaggtactttaattggcggaaacttatgcacgcttaatttgctgcagggaacggagtattttcccgaaacagaacatactattttattgattgaagatgattatatgtcagacatccatatgtttgaccgcgatctgcaatcactcatccacctccccgctttttcacatgtaaaggcgattttgatcggcagatttcagaaagcatcaaacgtatcaatggatcttgtaaaagccatgatcgaaacaaaaaaagaattatccggcatcccgatcatcgcaaatataaatgccggacatacctcgccaattgccacgttccctataggaggaacatgcaggattgaagctatttcgggtacatcacgaatatggattgataaacattaatcagcttgtaaatttttttacaagcttttttagcgcaatcggttatgcatgccgcacgagacatgacaaatgtcatataggaggcatgatgtgtgctactacaaaagacttctctcattagcgtatactgaaccgagacacacaatgagaggatacttactatgactgaacaaaccattgcacataaacaaaaacagctgacaaagcaagtcgctgcatttgctcagcctgaaacaaaaaacagcctgattcagcttttaaacacgtttatcccattcttcggcctatggtttcttgcttatctcagcctcgatgtctcctatcttcttacgttagcattaacggtgattgccgcaggttttctgacaagaatttttatcatcttccatgactgctgccatcaatcttttttcaaacaaaaacgctataaccacattctcggttttctgacaggtgtcctgactttattcccgtatcttcaatggcagcacagccattcgattcatcatgcaactagcagcaatctggataaacgcggaacaggagacatctggatgttaacagtaaacgaatataaagctgcatccagacgaacaaagcttgcatacagactttatagaaacccgtttatcatgtttattctcggaccgatttatgtttttctgatcacgaaccgttttaacaaaaaaggcgcaagacgaaaagaacgtgtaaacacataccttacgaatctggcaattgtcgcgttggctgccgcttgctgtctgatctttggctggcaatcgtttttactggtgcaaggcccgatatttctgatttcaggttcaatcggtgtttggctgttttatgtgcagcatacctttgaagattcttattttgaagcggatgaaaactggagctacgttcaggctgctgttgaaggcagctcattttataaactcccgaaactgcttcaatggctaacaggcaatatcggttaccaccacgttcatcatttgagtccaaaggtgcctaactataagcttgaagttgctcatgaacatcacgaaccattaaaaaacgtaccgacaatcaccttaaaaacaagcctgcaatcactcgcgttccgtctatgggatgaagataacaaacagtttgtgtcatttcgggctataaaacatatacctgtaagccttccgcctgattcaccagaaaaacagaaactgcggaagaatgcctgatgataaaggaggtcttctaatatactagaaggcttcctttttattgttggagggtgcattctggctttcacaatgataaagttacaagtaagatgaaaagctgaaaatgaggtaagatcatgattaaaaatcattttacatttcaaaaactaaacgggattacgccctatatatggacgatatttttcatcctccccttctactttatatggaaatcatcatctacatttgttattattgtcggcatcattttgacgcttttatttttttcggtatatcgatttgcttttgtctcaaaaggctggaccatttatttgtggggatttttattaattggcatttcaaccgcctccattaccctgttcagttatatttattttgctttttttatcgcgtattttattggaaacattaaggaacgcgtcccttttcatattttatattatgtccatttaataagcgcagccgtcgcagccaatttcagtctcgtattaaaaaaggaattctttctgacacaaattccttttgtcgtcattaccctcatcagcgcaattttattgccctttagtataagaagccgcaaggagcgcgaacggcttgaagaaaagctcgaggatgcaaatgaacggattgcagaactggtaaaattagaagagcgtcagcgaattgcccgcgatctccatgatacgcttgggcaaaagctttctcttatcgggttaaaaagcgacttagcaagaaaattgatttacaaagatcccgaacaagcagctcgtgaactgaaaagtgttcagcaaacagcgcgaacttctttaaatgaagtaagaaaaatcgtttcctctatgaagggcatccggctcaaggatgaactgatcaacatcaaacaaattctcgaagcagctgacattatgtttatctatgaagaagagaaatggcctgaaaatatctcattgctgaatgaaaacattttgagcatgtgcttaaaggaagctgtcacaaatgtcgtcaaacacagccaggctaaaacttgccgagtagacattcagcagctctggaaggaagttgtgattacagtgtctgacgatggaacattcaaaggagaagaaaattccttttcaaaaggacatggcttactcgggatgagagaacggcttgagtttgcaaacggaagccttcacatcgataccgaaaacggaaccaagcttaccatggcaattcctaataattcaaaataaacataaaggatggcttatatgattagtatatttattgcagaagatcagcaaatgctgctgggcgctttaggatcacttttaaacctagaagacgatatggaagtcgtaggcaaaggtacaaccggccaagatgctgttgattttgtcaaaaaacgccagcctgatgtatgtattatggacattgaaatgcccggaaaaacagggcttgaagctgctgaggagctaaaagatacaggctgcaaaattatcatcttaaccaccttcgccagacccggttactttcagagagctattaaagctggcgttaaaggctatttgttaaaagacagtcctagtgaagagctggccaacgccatccgtagcgtcatgaatggaaaacgcatctatgcacctgagctgatggaggacttatacagcgaagctaaccctcttacagatagagaaaaagaagtgcttgaacttgtggctgacggtaaaaacacaaaagaaatcgctcaggaactcagcatcaaaagcgggacggtgcggaattatatctcaatgattctagaaaagcttgaagtgaaaaatcgaattgaagccattacccggtcaaaggaaaaaggctggtttaaataaaaaaggatcttggcatctgccaggatcctttttgttaacctgaaattccagtttgagaacctcgccgcaaccagaattaaattgatcgatatcctcgctcctatacccgctgaacgattgcttgattaacagcccaataaaagactggattgaatgatatccctgttaaaatggtcggccattgcacatcagcagaatttctgatattgattattttgtattttcagtatgacaaagttgtgccacttcgctcccgaagctgccatgcccaactgcaagagcttaatatcacaataaaaaaccgtctgaaatcaatccgattccgttccgtaaatggcatctgctacatccaactgcttattatctgccaaaaaagatacaacaccagctcgtttcgctgatcaaagatagtaacaaccagctataaatgtcatgatgccgaatgtctctgtaatgtggaaccaatcttttaacccgagagcccctgaatcgcacataaagagaaaaacgggaccactttcttttatcagcatatgatataaacagctctaagcagaacaaaaaaagacacaagccaaaagctcatgtcttttatcacaatctatattattagtttaagactttaacacttacagttttgacgccccaattagaagcatcacttttacttggtacaaatacgtcgattttatttcctttaatagcgccgccagtgtctgctgctgttgcttccccgtagccttcaacatagactttagaacctagcggaattacattaggatcaaccgcaataactttcgcattcgggttcttatttaagtcaatgcctgtagctgtaacgccggaaatgccgccgtcgttagcagtgtaagcagtagcagtaactgttagttcttttgaagcttcttgattatttgtatttgattgaacagccttctcctctgtgttaacagaagtttctgcctcagcctttgtttcttgtttaggttgctgttgtacagcttcttgtttaggttgctctttttgcacagcctcttgttttggtgcagcttgaggtgcgtttgtttgcgcattctcagtagctgtgtttgctgctgttgcctgaccttttactgaaagagttgatccagcatagatcatgtcagagcttaagttattccaaactttcaggttgttgactgtcgtgccgaatttttgagcaatcttagaaagcgtatctcccgctttaattgtatattgcccagtcgtggttgtttcttctgaagaaatggtcagtttttctcctgcaatgattttatcagaagttaacttgttccattcttttaagtcctttaggttcactccatttttctgagagattccccagagcgtatcacccttttgcaccgtaatttcttttgcagaagcgtgagctccgaatgcagttgttgaaagtgcagcaactgccacaaaggacataatcgtcttcttcataagtaaatcctcccttgttagctttttattggcggctaacaggtgatatcgtaacacacgtaaatgtcaaatcaataacaaaaagatatgatttagattacagttcctttacatgaaggatttctctctgatggaaagacttgctgaacccttgatataataggcttcgcaggtctttttattttgaggcgaaacagagaaaataaaatgtgttttttatagaaaaaaagattgtttttctgtttttttagtctgtcatccttgcataagcttgtatttcttgtaaaaaaagccggccgtattttgctcttttttgttctccgactccttttatagacaaaagttcatcatcatttacgggctgttttcctgacatttcttttaacgtttggtcagagaaaacaacaaatggcggaacaccctgctcagccgcaatttctttccgaaccatgcgcaatcgttcaaacagctcgtcattttcagtaatcgaggccgcttttagcgcttcttttctcgttactgataattctcctctcagcacattccttcctttactgctgacaaaaagagtcggaaacgttccgtctgacatcctgatgaaatcgtcagaaataagaaattcgataaaatcactgatttcccctacggattgatgttttaatatcccatatgttgagagatcggcaaagccgttttcaagaacttttttatttttagatccggcgagcacttgggcaaccatcatcttaccaaagcgttccttcatgcgaatcatacacgataagaccatttgcgcctcccgtgtcacgtcatgagccatccttgtatcagtgcagtttccgcactgtccgcacgcatcaggctccttttctccgaagtacataaggataaaacgctgcagacagtcttccgtgtgacaatagtcgaccatttgcctcagcttttttaaatcctgcttttgtttctcttcatgttctgattgttcaattaaaaaacgctgcactataatatcctgcggtgaaaacaggagaacgcactcgctgtcaagaccgtcccgtccagcccgtccggcctcttgatagtagctttccatatctttcggaatttgtgcatgcagaacaaatctgatatttgatttatcaatgcccattccgaaagcagaggttgccaccatcacttgcagctcatcattaagaaacctttcctgctgctcttttctcacatcatcagccaagcctccgtgataccgccctgcattgacccgatttctttttaatcgctcataaatccggtcagcttcttttctggtcgctgtatagataatgccagcttcatgtttgttgttttgaacatactcgtcaataaaacgatccttattttctccctttgctactttaaaggttaaattgtctcgggaaaatccggtatatacggtgttttctttttgtatgtgcagctgtttgcagatatcctcgtgtacctcaggggttgctgttgctgttaatgccatgatgacaggattgtcatgtaattcacggaataaaatttcaatatttctgtagcttggcctgaaatcatggccccattgagaaatacagtgcgcctcgtctattgcaaccaaagggacatcaatgccctgcaaaatccgaataaactccggtgacgttaatcgctccggtgtaatgtaaaatagcttataggccccttctttaagcccagtcagcctttcatatatttcctgactcgattgtgtgctgttaatgtacgcggccttaatccccgcttcttctaacgcatcgacttgatccttcatcaaggaaatcaacggcgaaataacgatcgtagtcccttcaaacatgagtgccggaatttgatagcaaattgatttgcctcctcccgtcggcataatgcagacggtatttcgtctttcttccgtcaccgagcggatcgcttcttcttggccattgcggagcttttcataaccgaaataatgggccagaagggattgggctctatgtaacataacgtataaacctcgcttttccttgaatttcttccatcatatcataaaaaaacggtcttcatttcttccacacagaaattgaatttttgctataccaaacctttttaaataaaataaaaagccatttcccaaaaggaaatggctttcgctacgtcttgccgtatgcaagtaagaaagttttaaaccaccactcctcaaagtgggtgtttgcagaaacgttcctgtcgtcctctgcaatggaggcatgacattccggcttcgatataaaactccctattacagcttaaaggttaaaacttaattaacaatacgcacaaagtagcttcttttatatagtacaccatcagcagctttttatcaagagaccagaacaattgtttagaaaaactttttccagccgataaaaacgatttttcgctattatatccggagattcgacaagtcaaaaatatattacaataaaaaaacagccttttttcgcaaagaggattcatcactttcttctattataatatgtatacaaaaaaactcctatcgcccaatgataggagtctttgtttcattagaattttgcagcaagatcttttgcttcttgtaaacctttttcaatgatttcttgcgcttgatcaggtgctgcgttatgtccttcgatgacaactgtgtgcaagtcttgaacaccccagaaaccaagaactgttttcatgaagtttaatgacatttcaagtgcagccattggtccttctgagtagacaccgccgcgagcgttaagaagcgcaacttttttgcctcccattaaaccgactggtccttcttgtgtgtatttgaatgtaacgcctgcgcgagacagataatcaacataagtatgaagcactgctggcactgtgaagttccaaagcgggaatgcgaaaacaactttgtcagcttttacaaactggttcagatatttgtcagcaattgctgcttgttttttctcatcttctgtcatttccattccttgacctgctttaaatgttccgttaatcatatctctgccaaggtaaggaaggttttccttatgaagatctaattcaaccacttcatcattagggttgttttctttataagcagctaagaaagcttcgtaaagtttagttgaaacgccttcttcagctgtacggtcgcttgattttacaaataaaactgtagacatttgtattcctcccggtaaactttttatatttacttacaaatagtatgttactttcttttttacgtaaagtcaatcactttattttgaatatgagattttttttcaaaaaaaagcaagtacatctaatatcggtgtacttgcttgccatttttacttcgaatcttgttcacgatccaagatttcatacgtctgcgagcttttttgatcaattgtttctttgttggataagtcttttacctgttcatgaaactctctttcataagaaggagcatctgtctccagatcatcctccacattagcttgagcctcaactgtcattcttgcatagggaacagcttcaagtctttcgtaaggaatgtcttggccggttttttcacacacaccgtaagttccgtctttcatcttttgtaatgcacggttgacctcctctaacagctcccggtcaatctctttcactgtttggtctgtcatccggtctgtgacgagcgtcccgtggtctgccatatggttgtcaaccccgttggaaagctcccccacttcttccgtcattgattctgtttcctttttctcgccagacaattctttttgcatatcgagcaatttatgatagagatgctgtgtttgttcttttgtcagtgccatgtatatcctctcctttctatcctgtttcccgttttgccttctgtcaaacatggaaacatcgatggaaagaagctactgcctttttgaacggatcgtgaccgctggcgtcgatggtgcttcgggttttcgttggcactttttgtccttctcttctggcggtatataataggttgcgcctatatttaatctgccgctcagttcatcaatggtcagctcgccgaattcaagatgatagtcaattttttcgacattcagcgtttcaatatgtatataggtttcttcagactcctgtttgctgctttgtttttgtttctcaatcactgagagtctttcttcacattcacgcagtttgtcaagttctggtttcaagcaaagcctgatcagcgaccggaacatttttttcatgacatcacgaccctttgcatactcctctttcgtctacatatataatgaggtatataccatagaaaggagaggttttcatgcttccgactaacatcaatatttctcatctcaagactaactcgataggcaccggctcatcccttacctttggttctgcggagttaaggaacaggtgctctgctatcaaaagaaataacggttttggggaacaaaatgcagatgttattgttatggtcattccgattgaatcaattgatgaccgtgatggagcagatgcactcagtatgaaaatcaatcatcaataacaatggttttcgcttgaccttcgtctttttgaatagtgatgtataggattccgtctttaaaaatggcattcatctttccatgaagatgatcggaaagctgaattttcttctcaaaacttccgtatttcccttctttttggcgaaagtcctgttcattaaaataggaaaagcgctgccccttcaccactaaataatctccgtacgataatatgtgaacgtcttgtttacggtagcctggaagataaattaaaaactgcacttccgcaacggtatctacaatatccatgctcggaaatgaagcatctcctttccctcgctgatcttgctgcgcaaacggaaacggagattggccatttgtcataaaaggggttttttggtcttcatcaaatacctgtttccaaaagtcaccgccgtacatctgctgtgcgaattccatccactgcttcatcttttcgaaatccatttgaagccccctgtcttaacatactttataaccgccagcatacaactatagaaaggaggtttgcctgtggttcaaccaactccgtatatcaatattaatattttcatgctgaaaattaattcctttgaaaatgcttcagcggttaacgtaggacaaaatttattggcagaatggcaaaattcagataaaaaaaatcaaggctacggacagaattttggagatgcgagcggatttatgggcacgagaagccatgtggatgacagagaccaaattgattctccggcctcttttgaaagtgaagcggttaactcctcaatcaaaaggaagtgatgagatgttcttttcaccctccgtcgtgaatgtcggcggatttaaaatcaatacgatggatcgaggttcctctttaacactcggtccgtatcagcaggtcgattactttttatcagctaaaataaatcaagggtttggagaagaaaatggcgactttactcctcttgtcgtaccgatttcaaatgtattagatgcagatcttgttgattcgaactcagcgaaaaacagtgtggtgtaataagaacagggcgcacatgccctgttttttttataaaaaaaagcctaaccattttttgaacggctggctcatcaaatattcagctgcacaaatgctttgtcagcaccgcctgaacctcgcttaaatcggtgtctttcgcaaattctaattcgaacgttttgcttcttgtcatcaataaaagcccagtgtccggatcaaacattcccgcttcttgaatggcaaagctttcaattgttttatatggaagaaatacacgaaccttctttttggaaaacattttattgtcaaagaaaatgatccgcttatttgtaaagcaaatttggtccactcggagcttataaatcgattctattctttccccttcaacgagcaaagcctcaagcttctttgcgtccgttgatctgctaacagaaaaaatacccaatgaagaacccctctttctgcatttatctatttgttttatcattcactacataaaaataagtcctttatccctatataagaatacgacatagaagacatttaaaccattacgaacagattacatttttcaaatttttgatttgttttttggcttttaagctgttgtcatcaagtaatacgcacatatagagaaaaaagtttcaatattcagcaatgtttttataaaaaagcggtttttaatgatttttttaattttgttttatatttcctgttttaaccacaaaaaaaccgcagctgagctgcggttttatgtatcgactgcttttaacaaaatctgtttgatgcttcaaggaagcattacatctcttcgaagtattctttataatagccgccgactttattcgtattgtcgaccacaaagagaaactcctctgtttcattttttacttcatattcttttcccggcgttaaaacgcggtttacgatatatttttttgcgtttgtctgcacacactttacttttttaattgtttctttttcaagccaatttttatgaatcatgatgaaatctccttttcttatctataagcttattgtagcttttttcttttgtaaattgcaatatcggttattcattgattttgccttgatttctattatagaatgtttgtatacgcttacgtttgaagcaactatcacagcttatttctgctattcaatccaggaatcaatgtgctatcaccaagaatctcagaacagaccataaaaaatgactggaggtttgttacggatgagttctttaacgatgcaagtgacgaaaaggctggagacatttttacagggaacaaagaagctttatattgacggaaagtttgttccgagtgcctcaggggcaacctttgacactccaaacccggcgaccggcgaaaccttgatgacgctgtatgaagcccaggctgcggatgtggacaaagcggttaaagctgcccggaaagcctttgaccaaggtgaatggagaacaatgtctccagcttcgagaagcagactgatgtataagctggcagacttaatggaagagcataaaactgagcttgctcagcttgaaacacttgataatgggaaaccgatcaatgagacgactaatggagatattccgctggctattgagcatatgcgctattacgccggctggtgtacaaaaataacaggacagacgattccggtttccggcgcttattttaattatacgcgtcatgagcctgtcggtgtcgtcggccagatcattccatggaatttcccgctcctgatggcgatgtggaaaatgggcgcggcacttgcaacaggctgtacaatcgtcctcaaaccggctgaacaaacaccgctttcagctctttatttggcagaattaattgaccaagccggtttccctgccggtgtaatcaacatcatcccaggattcggtgaagatgcgggagaagcgctgacgaaccacgaagcggttgataaaattgcctttaccggttccactgaaatcggaaagaaaatcatgtccaccgcagcgaaaagcattaagcgtgtgacattggagctgggcggaaaatcgcctaatattcttctgccggatgcgaatttgaaaaaagccatcccgggcgctttaaacggtgtgatgtttaaccagggtcaagtctgctgtgcgggctcacgtgtcttcattcataaagaccaatatgatgaagtggttgatgaaatggcgtcctatgctgagtcactccgccaaggagcgggacttcataaagatactcaaatcgggcctctcgtaagcaaggaacagcatgagcgcgttctttcctatattcaaaaaggaaaagatgaaggagcaaaagcagtgaccggcggaagctgtccttttgaagcaggatattttgtcgcaccgactgtgtttgcgaatgttgaagacgaaatgaccatcgcaaaagaagaaattttcggacccgtgctgactgcaattccgtacgaaacagtcgatgaagttattgaacgggcaaaccattcagaatatgggcttgcagccggactatggacagagaacgtcaagcaggctcactatatcgcggaccgacttcaagccggaaccgtttgggtcaactgctataatgtgtttgacgcggcgtctccatttggcggttataaacagtcaggactcggacgagaaatgggatcatatgccttggataattacacagaagtcaaaagtgtatggataaaccttgaagactaacatgtatatttaaaaaactgctgcctgccagcagtttttttctttctgtaatggcggtaaaagacgctgaatatatatgcttctgaaggagttgagcgtgatgggcacacttcaggagaaagtgaggcgttttcaaaagaaaaccattacggagttaagagacaggcaaaatgctgatggttcatggacattttgctttgaaggaccaatcatgacaaattccttttttattttgctccttacctcactagatgaaggcgaaaacgaaaaagaactgatatcagcccttgcagccggcattcatgcaaaacagcagcccgacggcacatttatcaactatcccgatgaaacgcgcggaaatctaacggctaccgtccaaggatatgtcgggatgctggcttcaggatgttttcacagatctgagccgcacatgaagaaagctgaacaatttatcatctcacatggcggtttgagacatgttcattttatgacaaaatggatgcttgccgcgaacgggctttatccttggcctgctttgtatttaccattatcactcatggcgctccccccaacattgccgattcatttctatcagttcagctcatatgcccgtattcattttgctcctatggctgtaacactcaatcagcgatttgtccttattaaccgcaatatttcatctcttcaccatctcgatccgcacatgacaaaaaatcctttcacttggcttcggtctgatgctttcgaagaaagagatctcacgtctattttgtcacattggaaacgcgtttttcatgcaccatttgcttttcagcagctgggcctacagacagctaaaacgtatatgctggaccggattgaaaaagacggaacattatacagctatgcgagcgcaaccatatatatggtttacagccttctgtcacttggtgtgtcacgctattctcctgttatcaggagggcgattaccggcattaaatcactggtgactaaatgcaacgggattccttatctggaaaactctacttcaactgtttgggatacagctctaatcagctatgcccttcaaaaaaatggtgtgaccgaaatggatggctctgttacaaaagcagccgactttttgctagaacgccagcataccaaaatagcagattggtctgtcaaaaatccaaattcagttcctggcggctgggggttttcaaacattaatacaaataaccctgactgtgacgacactgcagccgttttaaaggcgattccccgcaatcattctcctgcagcatgggagcgaggggtatcttggcttttatcgatgcaaaacaatgacggcggattttctgctttcgaaaaaaatgtgaaccatccactgatccgccttctgccgcttgaatccgccgaggacgctgcagttgacccttcaaccgccgacctcaccggacgtgtactgcactttttaggcgagaaagttggcttcacagaaaaacatcaacatattcgacgcgcagtgaagtggcttttcgaacatcaggaacaaaatgggtcttggtacggcagatggggtgtttgctacatttacggcacttgggctgctcttactggtatgcatgcatgcggggttgaccgaaagcatcccggtatacaaaaggctctgcgttggctcaaatccatacaaaatgatgacggaagctggggagaatcctgcaaaagcgccgaaatcaaaacatatgtaccgcttcatagaggaaccattgtacaaacggcctgggctttagacgctttgctcacatatgaaaattccgaacacccgtcagttgtgaaaggcttgcaataccttaccgacagcagttcgcatagcgccgatagcctcgcgtatccagcagggatcggattgccgaagcaattttatattcgctatcacagttatccatatgtattctctttgctggctgtcggaaagtatttagattctattgaaaaggagacagcaaatgaaacgtgaatcttatcaaacggaaatgttcaattggtgtgaagccctaaaagatcagattcaaaagcgaggtcagcttgaccagtttgaagatcaaatcgacaagatgattgaggctctggaagatgaccaaacaacagaagaagattggtataaacaggccgctgccctttatcgggatattacagaatcagatgatacaagtgaaagacgcgcttatgtccctatagggaaacacgtgctgccaaagcttccttacaaatactccgccttagaaccttatatttcacgcgatattatggtccttcatcatacaaaacatcatcaaagctatgtcgatggcctgaacaaagcagaatcagagcttaaaaaagcgagagcaacaaagaattatgacttaatcactcattgggaaagagagcttgcgttccatggagcaggccattatttgcacagtattttttggttttctatgcatccaaacggaaagcggcgtcctacaggagcattgttccaaatgatagacctttcatttggaagctattccgcttttaaagaacattttacccaagccgctaaaaaagtggaaggcgtcggctgggccattctggtctgggcacctcgatcaggacggctggagattttaacggcagaaaaacaccagctcttcagccaatgggatgtaattccccttttaccgcttgacgtatgggagcatgcctactatttgcaatataaaaatgaccgggccagctatgtagaccactggtggaatgtcgtggattggcgcgaggcagaaaaacgttttgagcaggcaaaagaagtcgtttggaagctctattaaaaaaagccccctttccccgggggcttcgtgttttaaaaaatccctaccacatgcaaaaacacgatgatgatggcaacaggagatagatatcgaatgagcagcagccaaaccgcaaaccactttcgtttgagattggaaccgcttttcagctcgtcaaacaaatcctgtttcggtatttttagcggtacaaaaatcgaaatcagtaacgcacctaacggcattaaaatattgctcacaagatagtcggccgcatcaaaaatagacagatgaaatatagagacgtcacttaagacaccgtatgacaatgcagacggcacaccgacaataaaaatagcaattccgcctaaccaagcgaatcgttttctcttattgacatcgcctttcgaaagtactgcgaccaaaatttccagcattgaaaaagcagatgtcaatgcagcaaataaaaatagaagtaaaaatgctaataaaaagataattccgaacggcatttgattaaacacagtcggcagcacgttaaataacagaaccgggccttggtctggtttgaggccgaatgaaaagacagctggaaaaatcgcaattccggccattacagcaacaagcatgttcataacagttacagatacagcggactgtaccagattttcctgtttctctaaataagcgctatacgttaccatgacagatacaccgacacttaataagaaaaaggattgtcccattgcatataaaatggtattggcatcaattgcagttaaatcaggcatcaggaaaaatttgattccttccatcgcgccatcaagtgtaaccgagcgcaccattaaaatgatgaataatagaaaaagcgccggcattaatacttggcttgctttttcaattccgctgcttaccccttttgcaacaactaaaattgttaccaccataaagagcagctggcctcctacagccaaataaggatttgaaatggtacttgcaaatatcgtatcaaaaccagatgtctgcgataaaccgccagtgaagccttttataatataaattaaaatccatccgccgacgacactgtagaaagatagaagaataaagcatgtcaccatgcctaaataaccgatccaatgccacttcgttcctggagcaagtgttttataggactgaacggcatctttctgtgttcttctgcctatgatgaattcacctaacaataaaggcagtccgattaaaaccgtaaataaaataaaaataagtaaaaatgcgcctcctccgctggttccggcgacatatgggaatttccatatcgcaccaagcccgatagctgatcctgccgcggctaaaataaagccgagcttcgaagaccattgatttgcttccttcaccgtatcactcctatttgatctaaccattataaaagttcattgtaagaatatcttcctatatagtcaagaacattttgattagtttacatcttatatctatatacatctgccaaaaactaatattgaattattcagaaaattatttataataagagaatgttatgaaatttgtaagaatttctgctgaagttcttgataagtgtgttaggagtgtttttatggacatcattagaaaaataagtcatttcgcaggacaaacctttggcatatgggtcattgtttttgcagtgctgggattttctttcccatctttatttacgtggatcagttcttatattacgatttttcttggcattatcatgtttgggatgggccttacactgcaagccgatgatttcaaagagctggtcagaaagccttggcaagttattattggagtaatagctcagtatacgatcatgccgctcgttgctttcggcctcgcatttgggcttcatcttccagctgaaatcgcagttggtgttattcttgtcggctgctgtcccgggggaactgcatctaatgttatgacattcttagcaaaaggaaatactgccctttctgttgcggttacgacaatttctaccttattggcacctgttgtaacaccgttgttgattatgctgtttgccaaagaatggcttcctgtctcgccggggtctttgtttatctcaattttacaggcggttttatttccgatcattgcaggtctgattgtcaaaatgtttttcagaaaacaagtggcaaaagccgtacatgcccttccgcttgtttctgtcattggcatcgttgcgattgtctcagctgtcgtcagcggcaatcgggaaaatctgcttcaatcggggttgctcattttttcagttgttatcctgcataacggtatcggttatttacttgggtttttttgtgcaaagcttttaaaaatggattacccgtctcaaaaagcgattgcaatcgaagtcggcatgcaaaactccgggcttggggctgcacttgccacggctcatttctcaccgctatcggccgtaccaagcgcaatattcagtgtgtggcataacctttcaggttctatgcttgcaacatattggtcaaaaaaagtgaaaaagaaacaagctggatccaaaagcagcaatctatcactttaaatatgcatcaaaaaaggtacatcactttatcgtgatgtacccttttttattatccttctaataaaagctgttcaggatcttccagtaaatttttgattgtcacgaggaagccaaccgcttctttaccgtctacaatccggtgatcataagataaagcgagatacatcatcggacggttttcgaaacgctcttcatcaattgctactgggcgcagctgaatcttatgcatgcccagtataccgacttgagggctgtttaagatcggagttgacatcagtgaaccgaaagtccctccattggtaatcgtgaaggaacctccctgaagctcgctaagggttaatttattgtttcttgcttttttcgcaagctcgccgatctctttttcgattcctgcaaatgtcaggcggtccgcatctcgtactaccggtacgacaaggccttcatcagcagcaacagcgataccgatatcatagaatttcttaacgatcaactcatcgccctgaatttccgcattcaacagcggatattttttcaatgcagccacgaccgctttcgtgaagaaagacataaagccgagcttcacttcgttttgctcaaagaattgatctttgcggcgttttctgagattcataacagccgtcatgtccacttcattaaatgtagtcagcatcgccgatgtttgctgcacctctacaaggcgttttgcaatcgtttgtctgcggcgtgacattttttgcacttcgacaggtttatcaaagctttgctgtgcttttggagcctgaggctgctgcttttgctgaggagccggttttgatgccggtttttcgtacgcttcgacatcctgcttgcgcactcttccaagcggatctccagttggaacttgagacaggtcaattcctttttctctcgccagcttacgggccgacggagaagcgatcgttcttgattttgcttcagattgtgcttcctcgctcacctcttgtgcagctggttcagcctgtttctcttctttcacgctttccttgctttctgctttctctgtaggagcaggggcagaactttcacccgcgccttctgaaatcgtaccgataatttctccgacctggacggtatcacccgaatctttcaatacctcttgaagtacacccgattcttctgctgtcaattcaacattcactttatccgtttctagttcaagcagatattcaccctgttctacatagtcaccaggctgctttaaccattgggctattgttccttctgagattgattctgctaattcaggtaccttaatttccgccattttttcatttcccccttagtttttgcgagtcaagctatcagatacaatacgttcctgttcttttttatgaactgtcggatctccctctgcagggctggatcgtcttcttcgtccaatatattgaacgcttactccctctggtgcaatctctgtcaaatacgggctgatataaccccaagcccccatgttctgcggctcttcctgcacccaaacgatttctttcaggttcggaagttttgcaaataactctttgactccttttgccgggaatggatacaactgttcaattctcgcaatgtgaagccactctttaccgtcttctaacttattaaaatgatcactgatgtctatagacactttaccgctggataatacaagtctggttactttttcatagtcatgagaaagtcccgactgttcataaacaggctggaagcggctttcgctgagctcctgcacttccgacaccgtatttgggttgcgaagaaggctcttcggcgtcataatgacgagcggtctgatttcttcacgaagcagcattttagcctgtcttcttaaaatatggaaatactgtgccgcgcttgtcaggttggcaaccgtccagttgttttctgctgcaagctgcaggaatcgctcgattcttccgcttgagtgctcaggcccctgtccctcgtagccgtgcggaagcagcatgactaatccggatttttggccccatttcgcgcgtccggcagaaataaattggtcaaaatacacttgagcagcgttggcaaaatctccgtactgcgcttcccacaaaacaagcgtttccggtgaatgcacgttatagccgtattcaaaaccgagaaccgatccttcagacagagggctgttatgaacagcaaatgatgtgctgcagtcagataagtgatgaagcggcacaaattcttcgcccgtctcactgtcatgaagcacaaggtttctttgggcgaacgttccgcgctcggaatcctgtcctgttaaacgaatcggtgttccgtctttcaaaattgaagcaaacgcgagtgattctgccaaagaccattccacttttctgtcatcatcgaacgccttggcgcgtctttctaaaatgcgctttagcttgccgaaaacattaaatgactccggccagttgatcaattcgccattcagcttgcggagcacatcaaaatcaatcgaagtgtccacatctgggaaaccgtttgatacaggctctggaagttcaatttcacaggcagtgtgttcctttttagacggaactttctgatatgcatcttcaatgcgcttcgttaccgatttttcgatgttttgaacgacttcctcggtaagtacgccttcttttaccagcttttcagcgaaaatttgtttgacggtcggatgctttctgacagcatcatacaacattggctgagtggttgacggttcatccatttcgttgtgtccatagcgtctgtacccgatcaaatcaatcagaaaatccttgttgaatgtttttcggtattcgaccgcaaacttaacagctgaaagacaagcttcaggatcgtccgcattcacgtgaacaatcggaatttcataacccttggccaggtcgctggcatattttgtcgatctggattcagcgctttctgttgtaaatccgatcatgttattggcgataatatgaatcgcaccgcctacttgatacccttttaaagaacttaaattcaatgtttcagctacaattccttccccagggaatgcagcgtctccatggattaaaatggccagcgattttgtttcatcttgtaccgggtatccgctttgtgttcgcgtttcctgtgccgctcttgtgctgccttcaacaatcggattgataaattccaagtggctcgggttgttcgctaacgtaatgcgcgctgattttgtttcagcgtcttgaagctcccgattcgcccccaaatggtatttgacatcccctgtccatccgtagctgattccaattgatccctcagacgggacaagatctttattcggcgcatgctggaattcagagaagatgatttcatacggtttgccgagcacatgtgccaagacattcaggcgtcccctgtgcgccatcccgatgttgacacttgtcgtgcctgatttgacagattgtgcaataatgtcatcaagcactggaacaagagcgtccagaccctcaatggaaaagcgcttctgcccgacgaatgtgcggtgcaaaaactgctcgaagccctctacttcagtcagtctttccagcacagccgacagcttttcagctgagttcttctggaacagctcgccagattcaatctttcttgtcagccactcgcgctctttgaagtcatgcacatggtcaaattcaaaagagatggttcttttatacgtatttcgtaaatactgaatggcttctaaaccgttcgtaatgtttttaggagcgtctttgcagatgacagacgcaggtattgcttttatttcctcttctgttagcccgtaatcggataatggaaaaagttcgctctttttctcatcctttctgagcggattgacggaagcgttcaaatggccataggttcgaatatcttctgcaagtctgactgcggatgcgatcttttgaatcagatcggctgtaacacgtcccttttcttttgttcccgaggcctcttttatatcgcttggcggagcaccgagctcgtcgaacatttccttcaaatccgggtcaatgctgttcggatcctgggtatactgatcgtaaagctccagcgcatagccgaggttcggaccgtaaaaatcttcccaattcattcgttgtttcatactattttgaaacatttgaatattacccccaacttaaataatcaagtgatcgattcactatcttgaaataactttcgaacgctgtgtccaaaattatgtaataaaaacgcttccaacgatattttaccactgtttgcaatttgattctaccttgattgttcacaaaatagtaaaaaacctttataaaaaacaaaaaatttaatcattcgaaaaaacaaacgccaaaaagcataggattaagggctatcctatgcttttatgaagcagttttttcagcagcggatacaaaacatccggtagctgatcaacatccgggacaaatatactgaattttccgtacatatcctgaatcgtcttcatttgcgattcttctatttctgagttggagagaaaaacatttatcacttctattcctctttttcgggcttcgataaccgcctcacttgtatcgacgatcccattttgttcgtagccaaatgcggccggctctccatctgagaaaacaattaagaacttttgcgcctcgctgcgatgcagcatttttttcgtcatctgcctaattgcgtacccgtcacggttatcttcttctggctcaagctgcataatggccggtccagaatcttgtcttaatgatgattggaagggaataaccgtattgaaatagtttggttggcttgtttcggttgcatcatttgtgtcctcccagaaaccgacaatctgatgcggaaccgctaccgatttcaacgcttcgtgaaacagcacgattcctcgttttgtttcgtccattttgtcgaacatgctggcggaacaatcgaccagcaatgtaaaaactgcgtcgatttctgtagacggttcttgctttttgtagaacaggcgcggatttcgctcagtgaagtaacgaagaagcttattattcagtctcccggcatgaagatctgttctcggcaatgtttttttatgctccagcgttttttgaatcatttgtttcaaacgcttttgatacgattcaatcgtttttgcctgctgtttataagaaagctcctcttcactagttgccggctgcggttctttataaattggaaatgcatatttattttctttgccgtcagccatacccgctccgttcggctggtctttttgagactccagcgcttccagcttggaatagtctttccgtttcgtatgtctggctgatccttgaacagagccaagggcctgatctccatcgtcgccttcccttgaagcatcttttcctaaatctgattttgcgccgtgttcaatatcaaattgaaggaagcttttagacggtgcttctgtttcccggtgccatgtcggcatttcttcttcatggatatcctcatcaccgtctgatttttttggaagcgtgatgtcatcactcagcttcggcgcttttttctcttcttcaaataacggctgttctgcagcttttgcgtagtcaagctcaggcaaaaagaagtaggtgttcaacatgtctttatcgagcacctcttcaagtccgtccatgaggtcctcaacaattttcagaacctgccgtgtcgaatctacttcatacacacgcaagagctgctgctcaataaacgggcgcatcagatcgatatcttcacgcatggatggaagggtctcgagcggcgattccgctgtgagcttgacatagatcgcgcaaaagagcgcatcggtaaaaatgcttcgttccaaatttaaggtcagctgggttgagaaatgttttctgtacatgtcttttcgcttcgcaaatacatgtttcgtacccggacgctcacgtttgatgcattcttcgatcctaatgtcttcaagcagcataaagagctgcttggcaaaacttttaaaggtgagatgacgatggatatcattcaaaaagttcgcaaactcatgcagcgagctatatcttgttccgactgaacgcaggtagacgtcgcttttcagacccgcttccatgtcctcagctgccctgtctttccaaaagtggctcatatagattttcttttcaaatggattgtaataggactgaacgccatactccacttctaccgcttcactcttggtgagtgttttggccaaatcagtcagcatcataaataaaaatgaatcaatcgtgctgtcgttaaatttgataaatttcatcgcagccccctcattcaaacagagtttctgcaatatttcggacggccgctttttcccgatcatcatcaagcttttctacaattccccgctcaatggcacgacgcggcggaatataagcagctaaatcacatgtatcgattaaagctctgatggatgccgcttcttcagacacctgtccgttattggcctgaacgatcaagtcagaggaaagcgtgataaatctgtcaatcaatttctcgtctttcaaggctgactgagacatgagcacttgtttcagcagctcgcctttaatataaggcacatcaatgatgacaaaacggtttttcaacgcttcattcagaggaacagttccgacatagccttcattgatggctgcaatgactccgaaaccgcttttagcccgtatgacctcgcctgtaaacggatttgtcatcatttttctgtaatctaatacaccgtttaaaataggcagtgtttccggcttcgccatattgatttcatctatataaagaaaatggccttccttcattgcctttgtaacaggtcctgaaacaaactcgattgtcgcctggccagattgattttcaatcgttttataaccgaccaatgcctcagcatccaagtcgactgaacagttgacgctgtgcatcggtttatgaaaatagctggacaatgtttctgccaactttgtttttcctgaacctgtaggccctttcagcaggacattttttcccatggctaatgcaataatggcgtcaaatagaatggcttcatcctccgcctcatagcctgatgttcctataagcgattgaaactccggggaaataggctgctctttatatgataaaagcttttgttgtatatcttccggcaatgttaagtgctgtagttgtgttgtcatagacagattccctttcctattcatattccttaacgagtatactaaaaaagcccctgtatgctcaatacaaaagggcttggatgatattactgcttctcgttatttcccaaaagggctccgcagacaatacgcgcaccggaattgccgcttgggtttgtcagataatcgtccgcttgttcatgaataataaatgcacttccgtcctcgtcgagaatatttagtttacttccttttttcagtgaagtgtcaggcgcattcattatgacatctacctttccatcagcaccgacttcaaggttcggcagatctccggcatgatgccccatcggattattgaagccgtgttctttgttcagtggattaaagggaccgcccgctgattcaaaatccggcctgacacaagaacctttctcataaatatgaaaaccgagagaagcacctggacgcaggctgtttgcggaaatatgaatatcgaggccttcatcatctgattctttgatctctataaagccgactgctttcccttcacgattgaccaactggacatgatgaccaaacgctgacgtttcaaccacttttttttccggcacccggttaggagggtctggaggttttttttgtccgcatccggcaactcccagtgccgtcagcatcatcaacagcaagagacggtacatactgtctcccccttgttttttctaacagtgtggtcaatcattgtctggtataaacaaaaaagcctataaaaggctttttgtcatactcatttttaaaaataacttcttgcgcccaagtaccgctgtttccaatacgaattgctgagattggaaatgtcgacgcccgatgagcttgcatgaataaaatcaccgccgcctagataaatccccatgtgagacgggccggatttatatgtggtaaagaagacaaagtctcctactgacggctggctgactttctgcatgacattccaataccctgccgtactcaatcttgatatagatgatacattattaatgaggtaataaatgaagccgctgcaatcaaaaccggcaggcgtgtttccgccccatcggtaaggcactccgacatattttttcgcttccgttatcattctgtcaatcttcgagcctatttgaatgtttgaccctgagttatcttttggctttgttggctttgtcggatttgaaggattagattttgatgctcccgaaatagtcagaacctgcccgatttgcaacacatccgatgataaattgtttttatcacggatgctttggacagtgactccgagccgatttgcaattttccacagcgaatcgcctgcttttaccttgtacgtcgttgtttttgagggattggagtttgacggcttttttgaaccgctgtttccgctcttcggtgagctgcttccttttattttgagcacctgtttagggtaaagtgtatctgatgttaagccatttaaggtttttaattcagctacagtcatatttaagctgtttgcgattttccacagtgagtcaccaagcttgaccgtatatgtactttttgaagaacctgaagaattggaaccgctgtttttctttgatccatttgatccgcttgaactgcttgtccctttgatcttaagcttttgccccggacgaatcaggtcactgctcaggctgtttaagcttttaagctcagaaacactcattttatgatttttagcaatcatccatagggaatcaccatatgcaactgtgtatgttgatgttttgcttgaattagatggggatgtcgtgctttttttgctgctttcaggaaccttaagactttgtccgacataaagcaccgttgatttcaatttgttttcggatttcagagctgatattgtcgtatcatactggcgggaaagtttccaaagagagtcaccgctttttacttttatcgtttttgcttccgcgggtgctgcggccatcgacgacccaacaactgcagaaacagccaagccggctacaatcttctttttcattcattcaacctcctaaactgttttttgcaaaaacagctagtattttgtttccaaaaatggcacgcaactgttttatcgtcaatttttcagcaagttaaacccttttcaaacatttggcagcattttcagcatcgttcgacctttaaaccttcaaataaacatctaacattttacataagcacgatatgtttttcgaaagtctaaggaactatttaagcgagggtaaaaatgatggttttctattgatgaacgaagcagtttctcctcctttcttgtctatttttctaatcaattctctatcggcgtgtcaaatccctcttatgaaatggcaaaaagcctgttctttcgataagaacaggcttttacactatgcatttgctgattgagttttttgttttacagcttcaagaatgctatcggccgcttttttagagccgcctgccgctttcagtgattgtccaatttcttttgccttttcagcatacgaaccattattcattacatcttgtatcgtctctttcagaaggctttcagataattcttctttttttaacacttttcctgcgccgactttttccacctgatctgcgacaacaaattggtcgcctcccatcggaatgacaacgagcggggtttcaaaatacaaaccttcacttgtgctgttcattccgccgtgtgtcacaaataagctggctcttttcaagatctcaagctgagggacatacgggcgtacaatgaaattctccggaatgtcgtttaactcacttgttttaatatgcttgccgatggaaagcacaactttaccgtcaaagtccttacacacttcaaggcattgattaaaaaactgcttttgattattaaaaatggttcccattgaaataaacagcacgttttcattgtcaatctgatcaaatgggaaatcattgtttccggctctttctgtaatggaaggaccgacaaatacatatcgctcgccaaattgctcagccagtggctgaaatccccttgatgtaaagacgattgtcaagtcaccatcagctaaaaaaacatcaaatggcttcttgatctctgcttgaaaatcagcatttaacgtttctgcaagctgctggtatgattcataatgaggcgaatcttcaagtgatcctttcatgtacgctcccatcatttccttcgcaaattcctcattcatcgcaaaggttgtacacaatgaaaatcttggcagcttcagcatgttggcaatgactttacccgcgagaagatggtgatcatatatgacataatcatacgattcatgtttgacttcctcataaatatgagtcgcgatatccttacaggctttcaaaaaagcgcagagcatttctgtgaaatctctttcttcatcgccggttgcgtttttcccgaagtaatctcctctgaaatcatgatactcacgaaactctatatcaagagctgtgattttttctttatattccttcactgcgtagtacgtaatgttttctccccgggatttcagctccttcatcacaccgatagagggattaatatgcccttcaccgggaaaaccgatcattaatacattagccatgcgacagcacccttcctttgaaaatttatgtaatattttatacggtactataaatacataaacaggtaaagtatttcacttaattaatattcattacatataacttttctaccagtttatatttcctgtcttcaagacaaaaagcattcagcttgaagcgaatgctttaataaagatacgaattcagtcattttgtctcatgataggattcttaatcaggccctttttattatttttacgttcttggtgaaattaacggatataatacaccgtctttggcaaacgacatcttccctgtttcctctgaaaccacgagcaccagtgcatccgtatagcccgacataccgagagccgcccggtgccgggttcccaaatggatatccacttccttcgtcgtcagcgggagcacattggctgctgacacgagtttgttttccctcactaacaaagcgccgtcatgaagagggtttccggggaaaaagatgctttcaattaatgaagagctgatctcggcgtgtagggaggtgcctttttgaataaaatgttcaaccgggtccgctctttcaatcacaattaaagctccatgcttatgttccgataaggctttaatcgccttggccagctcaataaatgccggcgtaaattcctcaatgtatgattgcaaataaaaggaggatgcaatcccctgcatgtcctgaaatatgtgccccaaatcatctaattcacaaaggagacactggtctttttcgtgaagcgttttcaagattagagatgcatcacctaatatttgctctaggtacacctgtattttccccttgaacgcattttctgatatctgctcatagcgcataatcttcatctcctgttcaaatttccaacttttcacgaatgcttatcttattgatgcacattctattggtaaaggagggatgtaaagaatggaaatcgaaagaatcattcagtatatttgcacctttttaggcgtgatttcgctttcttttatttatgcccaaatgtttagaaaaacgaaaccgacaaaaaaagaataggcccggcgttcattgctttttatacataaaatgttataatttctctcgttatgaaaaagaaacggagatcaatgtatgaaagaaactcaaaacgcccgggaaaaaatcaaacagctcttgcacattttaataccgatattcattacccaggcggggctttctcttatgacttttctagatacggtgatgtcagggaaagtcagccccgctgatttagcgggtgtcgcaattggctcaagcctttggacccctgtttacacaggacttgcaggtatattaatggcggtcaccccgattgtcgctcagttattaggcgcagagaaaaaacagaagattccctttactgttttacaggctgtatacgtggccgcgctacttagcatcgccgttttattgattggatatgctgcagttgaccttattcttggccgattgaaccttgatattcacgtgcatcagattgctaaacactttttaggctttttatcactgggaattttccctttatttgtttacaccgtgttgagatcattcatcgactcattaggaaaaacgagagtcaccatgatgattacactcagttctcttccgatcaattttgtattgaattatgtatttatcttcgggaagttcggaatgccggcacttgggggtgtcggcgcggggctggcatccgctttaacttattggtgtatctgcatcatcagttttttcattattcataaaaacgcaccgttttctgaatacgggattttccttaccttgtataagttctcttggaaagcatgcaaaaatttgctcaaaatcgggctgcctattgggttcgccgtgttttttgaaacgagcattttcgcagctgtcacgcttctcatgagccattttcatacagtgaccatcgcgtcccaccaggcagccatgaattttgcgtctcttttatatatgctgccgcttagcgtgtccatggctctaacaattgttgtcggatttgaagcgggtgcagcccgttttaaggatgcacgctcatatagcttaattggcatcatgatggcgatcggcttttctttgttcactgccgcctgtatccttttattcagagagcaaattgcgggcatgtacacttctgaccccgatgtgctccggctgacacagcactttttaatttatgcgctattttttcagctttccgatgctgttgccgcaccgatccagggagcactcagagggtacaaagatgtgaactatacgcttgcggccgcttttgtctcttactgggtcattggccttccggtcggttttatggtcggtacgtttacaagcctcggtgcattcggctattggattggattaatagcgggactcgccgccggagcagttgggctgtttttcaggctggcaaaactgcaaaaacgttattcgcaaaaacaacacatttaaaagaggtgatcaatcatggcaaaaaacaaaaaattattcgagtatctttcccagcatgcggaaaccatcagttcaacatggtatgaaacaatcgaggagactgatcccaattccatttatgcctcaacagatcctgttgtcattcacaatttaaagagccagaatcttgcctttaactataaaataaaccgtatttttatagatgatgaggacgtatacttgcctatactgaaagaatgggcctttgaagtcacacaggatcaagagcatttaaaaactcctatccactatattattcgggagtttgtcagagtgagagatttatatgtttcctatgtgaaagaatttgtccatctcaatcaggatactgtgaaaagcgaagaagccgaagacctgtatcacgcccttataaaagcgtttgatcttgtgattcatatttttatagaagaaatgtacaaaaacacaagccttcagcttcaggcccaaaaagatatgattactgaattgagcgctccggtcattgtgctgtttcacagcgtcggactgctgcctttaatcggagatattgatacagtccgcgccaagctgattatggaaaacacactgcatcaatgtgcgaaaaaaaaggtgacacaactgtatattgatttgtcaggagtagctgtgattgatacgatggttgcccatcagctgttcagtctgattgaggcgcttcgtttaatcggtgtttcttcaactttgtctggaatccgtccggaaatcgcgcaaacagcggttcagctaggtttgtctttcgaaggtatttccttgagatccactctcgcttcagcaattgcatcggacttaaaattaaaaaaggtataaggcttaaggccttatacctttttgattaatcattccattgatacgtccaatatatttcttcttcaaaccatgttgccataacaggttcattatttttcaatttctcttcaagctctctgagcatgccttctgtttgtgtgcggtgagctcttaacgcattcattttaatatcagctacttctttgatatcaagtacgacatcagcttcgccgagaacctcttctctgttgcgggtaatggccatgcagattgtacgcggacggtcttctttctttttgcggtacaatgcacggataaccgcttccccgcatgcatcatggtcagggtgcacaccgtgtccgggataaaatgtgacaattaaacttggttttacatcatctatgatctcttccatgatatcagctaaatactcatcatcttcaaattcgagcgttttgtcacggagtccaagcatacgaaggtcattgatatccatttctttgcaagcgttgatgagctcttgttttcttagcagcggcaacgtttcacgattcgcgaaaaatggatcgcccatatttctgcccatttcacctaaagtggcgcaggcatacgtaacgggaatgtctttttttctgtttaaggcaatgaggcctgccactccatatgattcgtcatcagggtgaggcaggattactaatacgtgttctttcattatttttcacccttttctttaaactgtgaacggtttttcactgatttgcagagaaatagccagtttaccgcccggcagatgtcccgccattaataaacggttttcttcatctaccgtgtattcagtcaagccttcagcataaatccagccttcttctgttttcaagccaacgcggtaaggcccgttgcctttgatttttgcctgatgataagtgacttttgcattgcggatatacgcaacaaccgtcatgttcttttcatttaagtgcgctgaataagaacctgtggtggtttctaaatggatatatacagggcggtccgcatatcgttctaaagatgcttgcacatcttcttttatgatcgctttcatgattgctcccctctttcttcttttaaatactctgcacgttctgtatgtaatttgaccagctgatatttcacagccggttcgagctgtgaattcacaatgcgctgaatcgcggcaaaatatttttccagcatcggttttcggagtcttggatgtgttcgtttatccaagagctcaagatcaatcgcctctgctaccgcttctgcgtcatcatgtgcgagagatcggttattccaaagtgaagcatatgctttcactatctctttatcattgtccatcgtcttgctcctttatgtcttacatacatgaaatgattatacataatatatgcatcagctgaaaagccaaaggcctcaatggctttttgacgcccgtttccacttcacttgtgaaaacgtaaacaagatcagcgcagcccatatacagctgaatgtaaaagccttcgagctggaaaatggctcattgtaaacaaacagcccgatcagaagggtaatggtcggcgcaatatattgtaagataccgacttgatacagtggcagccgtttcgctccttccgcaaacaataagagcggcaaagccgtaaacacaccggccaaaaagagaagcagccacgtccctccgctttctgcacccgctggctgaacatgtccgctgaacagcaaataccccaatgcaatgggcataatcatgaatgtttccagcgttaaaccgatggcgctcggcaggcttgttctttttttgcttaacccgtacagcccaaagctgaatgcgagcagaagcgcaacataaggaatggagccgtattggaacgccgagatgatgacaccggctgccgcaatcgaaacggccactaattgcaggcgattcagtttttcctttaaaaataaaatcccaaggagcactgatacaagcggattaatgtaatagccaagactagcctcaagcaaaaagccatggttgacagcccatatgtatacaaaccagttgatcgaaatcaggatagaagcaagaaataaagagaggatccctccgttctttttcagagagcgcagctcctgccatcctattttccattgccgcaagaaaaaaagtacgatacacataaaaacaaaagaccatataatacgatgagacaaaatatcaagagccggcagctgttcgagaagcttccaatagagcggaaacaggccccacatgataaaggaaacggctgtgtaaataacgcctttttttgtttctgaatattgcatttatatccctgcctttctttagagcatcttatattatatcacgtgaaagatctggcgggcatatactattttgtccgtgaagaaaggatgtgaagacaatgtttgagtggaacaagtactttcctttccacaatcaattttctaaagaagcattaaaaaaagctgatccgaaagaagttgaaacgtatgtcaatcgtgtgatggaaagtgtgttcggcagtgattatgcggctcaatttcctttccgcgatcctcttccccaaaaagaacagcccgccaaacctgatgcaaaacctgatattgatatattcgaaacagcagaccatgtgtttgtaaaggtgccaatcagcgaagaatggctggaacaagtgagaatcaaacacacatctcacgaattatggttggaaaacttcccaagagcagatcatccgaaaaaagtaaaccttccttgtttagtcaaacgcaaaggaacaaaagccgtctataaggatggccttctggaagtcatgtttcaaaagcagcaagactacaatatgtccgaggtagaaatcatccgataaaaaacggcctgcaatcgatgcaggccgttttttattaatagaaaccgggatatcccccgtatggcacgccggcaccaaaaccgtacggtccgcctccatatccataagggccaggaggataggcatagggacgagaatagttaaacagcgcactcccgagaaaaccgcctaataaaccgccgactagaggagcgccaaacaaaaaaggactacgcgccggatatccggctggacctgggattccgcgtaaatacgaatgatgagggtacatgaatttttcctcctttatgtctgcctatacgtaaagtattcagcaaggaagaaaaacgattgggctacggactgtctatgattgttacatcacaagccctgccaataacacacagccgagccctgtaaccgaaagaactgttgtaagcagcgtccaggtttgaaatgtttctttcatactcaagccgaaaaattcctttaccatccaaaatcctgcatcatttacatgacacgcaatgacactgccggctcctgttgcaagcaccattaacgcggggtttacactgccagcctctataagcggagctgccattcccgctgtggtaagcgcagccacggtagcagagcctagacacagacgcaaaaccgcggcgatggtccatgcaacgaatagcggcgacatgtttgtttgacggaaaaaatcagcgacataatcgccgaccccgccgtcaatcagcacctgtttaaacgctcctccccctcctatgatgagcagcatcatcgcaatttgcgaaattgattctgaaatagatctgctgatttcctgcatagatattttacgggcatatcccatcgtatagagtgcaagcaacagcgaaatgagcattgccgttcccggagtgccgataaattctataatgtcttttccttttgaatgttcactcaataataaagaaaaaactgttgccattgccataaagataaccgggaataaagacgtgacagcactgatcgcaaagcccggtgtttcattcagctgaaattctttccttggtcctaaccccgataggtttccatgcttttgatacgcaccaggaaaccgtttcatcgcaaatttattaaataaaggcccggcaatcacagttgtcggaacagcgatgatgattccaaaaagcagcacctagccaatatgggcaccatatgcaactgagatagcagttggagcaggatgtgggggcaaaaatccgtgagtaacatttaaggcggcggccatcgggattcccagatacagaaaagacatttttaattctttagcaatcgcgtaaacaatcggtatcaacagaacaagacccacttcaaaaaacagcgcaataccgatgataaaagaggcaaccacaaccgccgcctgtattcgtttcctcccgaatttgccaatcagcgtaatggcaatccgatagccgcccccagcatctgagacaagcctcccaagcatcgcgccaagtccaaacactaaagctaaatgccccagctgcccgccaattccagcctcaattgaaagaacaattttattgatatccattccaagtccgatctctactaaaaatgaaacgacaatcagtgagacaaaggtatttaattttactttaataatgagaaataacagaatcagcactccgacagctacaattaaaatcggcatggtacccctccaaaagtgttttatatgattctcgcgacaatgttttggcgtttttcatgcctagacgaacagaaaacgctttcattaataactaaaaacgtcttggttatatgattgttatcttttgatcaactaatatgttcatactaatctcctaatcaatgactgtcatcgtttttatgagcttgtctcgattacctaccgcctaacccaatgatttattagttatatgttgattaacttttggttatatgttatgttttttaaagttgactgccaatcattatatctattcattgtctggaagcaaatgagacaatatgagaacagacggataacaacttcacagaaggaggagtacacatgccattattgcgttttgatgtaattgagggccgtgatgaaaaatcgctgcaattgttattagatactgctcaccaagcgatggttgaagcatttggtgttccggaaagagaccgttatcaaattgtccatcagcatcccgcaaacgagcttataatccaagatacgggattagggtttcagagaaccaaggatctggtcatcattagtatgacaagcaaagcaagaaccgaaagccaaaaggaaaaattgtatgctctgcttgctgaaaggctagaagaaaaatgcggaatttcccctgaagacctcatggtatctattactgagaatggtgacgcagactggagtttcggtcttggtgaggcgcaatttttgaatggaaaactataaaatttcgtctccccacaaaaaaaagaagagagagctccaagaagctctctctttttttcataaatgcggaagtcatcagtatagaagcatccagcaatacgaaaaacctggatctccttattagatccggtttaaacgccaattggatgctgactgggttttggccgaaaatataaaattttgctgatttgcataataagataactcataatccccatttacaacaggttggatgctataacttattgatcatttccatgaacatgacacttttgccaatccggaaatgtcagtctgacaaatataaaaagtcatgtaaacggggtgtgaaccgtacttacatgactcaccatggaaacaaaggctctttttcagacgccgctttccttatttctcttcttcacacactgtgtcaccaggctcgcaaaattgatcggcccatgcctgcatctcttgaaatacagcttgaagcgctgttcctttttcagtcagcgtgtagatgactttgaccggcgtttcagggagaacctgccgttcgacaatctcgttttgttcaagctccttcaagcgctctgccaacattttttggctgatcatcggtattgtttccgttatctctttaaaccgtttcggcccatccattagcacatggatgatcagaccgttccatcgttttcccagcaatgagaatgcggattccattttagggcacatcgtatttcccacaagtcttcatcccttcatctattgattgacatgtattcaatgatccattacaataatctttcaagttacatttagtaagcttctaacttttctattatcataccacgtttatccgaaggaggaaacactatgacgaatactctggatgttttaaaagcacgtgcatctgtaaaggaatatgatacaaatgccccgatctctaaggaggagctgactgagctattagaccttgccactaaagcgccttccgcttggaaccttcagcattggcattttacagtattccacagcgatgaatcaaaagcggagcttcttcctgtagcgtataatcaaaaacaaatcgttgagtcttctgctgttgttgccattttaggcgatttaaaggcaaatgaaaacggtgaagaagtttatgctgaattagcaagccaaggctatattacggatgaaatcaaacaaacattgcttggccaaatcaacggtgcttaccaaagcgagcaattcgcacgtgattctgctttcttaaatgcttctttagctgctatgcagcttatgattgccgcaaaagcaaaaggttatgacacttgcgcaatcggcggatttaacaaagagcagttccaaaagcaatttgatatcagtgagcgctatgttccggttatgcttatttcaatcggcaaagcagtgaagcctgcgcatcaaagcaaccgtctgccgctttcaaaagtatcaacttggctgtaaggatatgaaaaaccttagtccgaaatccggactaaggtttttttatacaatcgcctctttgtaccattcacgagcctgttcagcttcatgctgagtcagctgatggcccccgtcctgccagtaaacggaggctgatgccccgctgtcacgcaaatagcggtaaagctcttctgattcttccttcgtgcaaagaggatcgtatttcccggcaccgataaaaacagggagccccgccatatcaggcagctcgataccccgaatcggaaccattggatgatgcagaatagccccttttaacacatctttataatgaaaaagcaggcttgccgcaatgtttgcgccgtttgaataaccgactgcaatcactcggccgcgattaaactgatgcgtttctgcagcctcgtcgataaaatctttcaattctcttgtccgcaccacaagatccttttcatcaaaaactccttcactcagacgtttgaaaaatcgcggcattccattttcaagcaccgatcctctgacaccaagcaaatgggcatcagggtctataaaccgccccaatgaaagcagatcgtgttcattaccgcccgtgccatgcaacagcaaaagtacgttgtcagatgttcctttttcataaatatgcttcattataaattcccccttttaaagttcaggtaaaatgtctgtaatttgttgtctatgtttctccagccattcaggcagttttaaggaagtccctagctcagcaaacgtttcatctgtcataaagcccggttcatctgtggcaatttcaaataagataccgcctttctccctgaaataaactgatgtaaagtattccctgtcgagaatttctgacgcaggcagatggttttcagcaataatcggcagccatttcgcctgttcctttttcttagtccgaaacgctacatggtgtaccgtaccatatcctccgactcctcttttttcaggatgtaaatggacatcaatgacaccgccgacggccgctgaggatgccagtctgacaatctggtcttcttcggccactttggtgtatccaaagctttccgttaacaattgtatggtcgcctgcgggtcgtaagaatatagcagcacacctttcattcccgtaattgcttcatttgttgtgatcccgtcaggcgtccactcgcttttgccgcttttcgcatcctccatgatcgccagcggaaggtcttctgtatcgtcaaaaataagacctttttcaccaaacaacgttttttcctctaggctcagcccgcttttctcaagacgctccttccaaaaagacagggagcctgagggaactgaaaagtacacccggcccgcttggccttttcctaccgttccctgtccgcttccttggaacggaaaaaaggtcattattgtaccgggatctccgttttgattcccaaagtaaaaatgatacgtcccgggatcatcaaagtttactgtttttttaacaagtctgagcccaagcacttctgtataaaatcgcaagttttcttgcggatctctggcgaatgctgtgacatggtgcaatccttctgttttcattttctcactcctatttatctcgatttcaagatatttattattttaaacctttattgaaaaggatgcaaaccatgtgttttgtttaaataactgaaaaaatcatttttttctaataattatcttgtgatcttttcttacaactgctattatagtgagcattatcatgtttcaggaggaaagtaaatggttaaaaaagcacttattgttattctcattcttttgccattcgttcagctcgcgcttttgccgcttgtgaatcgaatagaaccgattatgttcggcctgccgtttttccacttttggctgctgctgtggattattgttacgccgttatgctcgtttggcatttatcagatgcaaaaaaaagatggaggacttgaataatgcaagggaatctgactgcacttctcattactgctattattgttttaaccgttgtctgtatcggctttctcgccggaagagacaaatcctcacgtacttctgtggaagaatggtctgtcggcggcagacgcttcggcggtcttctcgtctggtttttagtaggcgctgacctttatacggcctatactttcttagggttgaccagtactgcttttacaggcggaagtgttgcatttttcgccattccttattctgtgttggcctactttatcgcctacttcttctcgccaaaactttggaaagttgcgaaaattcataaattaacaacactcgcggattatgcccgggaacgttttaacagtaagcttttggcaagcctcgttgccatcgttggggtactcatgcttattccgtacatatgccttcagctgagcggcattcaagacacgcttcaggttgccggcactggctatattaacgtaaaattcgttgtgatcatttcatttattcttgttgctctttacacattcttcagcgggattaaagggcccacatatacagccatcattaaggacattttagtatgggtcattatgctgtttatggtggtgtccctccctctcattcattttaacggctggacgccaatgattgacacgttagtgaaggaagcgccgcaaatgctgacgataccggcagaagggccaaaaggcatcccttggtttatcacagcatctattgtttccgctctggcactttttatgtgggcacacgccgctacaggagtttttacagcgaaaagcgctgatgcagttagaaaaaacagcatgtttttgccgctttacaatattgtgttaattttggtcatttttcttggctttatcgcctttcttgttctgccggaagatacaaatccaagactcgcgctgctgcatttgattcaaacatcttacggcggcgtggcacaaggttttgcatatgccactatcgctcttgcttcattaataccttgttccattatggcaatcggcgcatcgaatttattcgccaacaacctataccgggatttgattcatccgaatgtgtcgcaaagcaagctgactcttgtcacacgttcaatggtgtttgttgtcatcggtctcgcgctgctgtttggaatgctgtttccgactgccttagtgacacttcagctattaggtgtatccggtatggtgcaaatcttccctgcgattgctgtcagcctgttctggaagcgtcaaacaaaagaagcgacagttatcggattattagtcggccttgcggttacgtttattgtgtataccactcaatccgcacatggcatttatgaaggattctggggattggccgccaacatgatcgctgtggtgatcctgaatccgctgttcgttaaaaacgcgggatccaatcctgtcattgaaggtttatttggcaaaaaacaagacgctaatccaaatcaaaagggtgcataaaaaaaccatacgcggcagccgcgtatggtttttttacatttcttttttcagtgtttcaattgccttttccatttgcgtatcattatcagacagcttcttttgaagttctatcattaatttcgttgttgtatcgccagtcagtatgcctgtctctttcagcttctcttttttctggaactgtttgacgacagatacaaagtcctggtcatacgtactgttaacctttaccttgtaaccaagtgctttgagcattttctgagccactttgacgtttgtgcctgtatcacctgatttgtacgttttatctgcgtccaaatacggcagcttcgcgtaatcaggcagctcagctttcacttgaggcttgatgccttttttgtgaatccattcgccgtcagcagtcagccatttggcaactgtcagtttgacagtagagccatcatcatattcttttgccgtttgcactgtacctttgccgaatgtcgtctcgccgattaacggtacgtttgacgattcatgaagggcagcggccataatttcggctgcgcttgctgtaccgtcatttactaaaacgacggtcggcttggtcactttccgttctttttcggccttcatgacttcttttgaaccgtttttgtattcaacctgcatgatgtttttccctttatcaatgaacaggttgctcatcgtaatcgcctgttccattaagccgcccgggttgcctctcaagtctaaaatatagcctttggcgccttttttctctaaactgtcaatcgcatctgtcagctctttagctgttgtttcagagaaagaagtgatttgaatttctccgatgttgttgtctttcatctctgaatagacagtctctacaggaatggtatcgcgcttaatggaaagatcgatattccccactcccgctctgttcagttcaagcttcacctttgtgccctttttgcctcggattaaagcgacggcttcatttacattcatgccttttacgctttttccatttaccttaatgatttggtccctcggtttgataccggctttttcagcaggtgaacctttaattggggatacaataaggatttctccgtctttctcctctacttgggctccgattccttcaaaagatgctgaaatcgtctcgtcgaatgatttcgcttgctcttgatccatatatgtagaatacggatcatccagtgattgaatcattcctttaattgctccgtctactaatttgtcatcatctgttttttggtaataatcacttttgatttgctcatacgctttatttaatttgtcgaacttgctgtctcctgtgcttgctgatttttggcccaggatactggaattgcccgtaataaataaagtaagcgccgaagcgacaactgcagtgatcagcacaataaaaaacagttttaattgccgtttcaattaaacaccacctttttcttcttacattattatcatggacgaattcttattcgtcaactcggagcagaaatgaaagagaaacgcccttcttttgcttttcataaacctatgtctttatacgacatatgataaggaaaaaggaggattcgatattgagccgatatttagaaatgctgtccttattcggtgtcgcaggggcgcacccaggcgggctggctttttcaaaagcggtcttgcaaaaggctgcaccctctccgaatcagccgattcttgatgccggatgcggaacagggcaaacggcggcttatttaggacatttgctgtatcctgtaacagtcgttgataaagatcctattatgcttgagaaagcgaaaaaaagatttgcgaatgaagggcttgccatccctgcataccaggcggagctggaacatctcccgttttcttctgagtccttttcctgtgtcctgtcagaatcggtcctcagtttttcacgcctgacatcctctcttcaagaaatttcaagagttttaaaacccggcgggatgctgatcggtatcgaagctgctttaaaaaaaccgatgccccctgcagaaaagaagcaaatgatggatttttacggatttacttgcttacatgaagaaagcgaatggcataaactcctaagatcctatggctttcaaaaaacagaagcgatgacacttcttccggaagacatggaatttgaaccaaccacagaaatggatttatcgcaaacgattgatcccatctattacgatacgcttcaaactcattatcagctcatgcagttatatagtgagtacatgggtcattgtatttttatcgcgtacaagtaaaacggcgtatcgccccctgttttcgtccaacctttttttcctatctatcatatgctgatagaaagtcaggataggaggggaacaatattggagagatattatcatctttgcaaaaaccatcaaggtaaagtcgtcagaattacagagagaggcgggagagttcacgtcggcagaattacccgtgtaacaagagacagagtttttatagctccgaccggcggagggccaagaggtttcggttacggatattggggcggttattggggatacggagcggcttacggtatttccctcggtttaattacaggggtcgctcttgctggtttattcttctggtaagcatagaacaaatgctagattcaccagacacaatgaagcccgcttatctagtgtaagcgggcttttcattttaaattttcttcactttttcaaagtactcttcaagcgttaaatcattatcttggatgacctttgcggcttttttgcctacatagcgcagatgccatggctcatattcatatttcgtgatatcttctttatttttcggatagcgaatgataaagccatatttataagcattgtcctgcacccatttcccgtctgccgtgcttccgaacgcttcatttagctcaaagccattgctccggctcgaaatgtccatcgcgaggcctgtttggtgctcgctttcacccgggtaagcaaccgcttcctttgccttcttttccccttttaggcttacttcattgtcaaaaatgactttctgtctgtcatacgaacggtaccctgagacagctgccagttcatagccttcctttttggcagcatcgaacattgtttttaatgcgtcggccgcttcttttctgatgtaacgtttttgaatcttttcttcaaaagaaaactctacatctggtatgacaagatcgctaggttcatagtttccgggcagtgcatattgtttattgacaagcgcgagtatattttctggattttgaatggtttccagaccatcgacttttttaatatcattgaaatactggctttccaatgaaaactcactgttttgagtgtttgattttttgctgtcagctgttttttgttctgtttgctttgtttctgctgtggttttcgtatccttttgagcatctccgttcgacatgctgcagccggctccgactattgccgttacactcagagcggcagccagtgagaaccatttaccggactttttcatattacattaccttccttttatcaatcgtttccgcattcataaagaagaggctgccggcacccagcacgcctcttgatatattttattgtgatacggaatgtaaagccacttctatcatatcatgaaatgtcgtttgacgctcttccgctgtcgtttcttctcctgttaatacgtgatcactcacggtgagaattgacagggcttttcttccgtgcttcgctgctaatgtatacaatgcagttgtttccatttcaacgccaagcacaccgtattttgcaagtttttcaatttgcgaatcgtcattgtagaactggtcagctgtaaatacgcttcctacagtcaccggcacacctttatcctttgcggcatcataggcattttttaaaagctcgaaatctgcgcaaggcgcaaaatcaacgcttccgaaagcaactctgttcatttgtgaatcagttgaggaggtcatcgccaaaatgacgtctcgcactttgacatctttacgaatagcgccgcaggaaccgactcttattagattttgcacatcgtagctttgaattaattcattcacataaattgaaatagacggaacgcccattcccgtgccttgtactgagatttttttacctttatatgtacccgtaaatccatacatgcctctgacttcattgtagcattctacattttcaagatacgtttctgcaataaattttgctctgagaggatctcccggcaaaagcacagtatccgcaatttgtcctttttcagcacctatatgtacactcatctcatatcctcctgtaaatctaaattatcatccagcccgtccattttacaacgaatgtcatgatgaaacaaacttcagcattgattataaaggaatatgtcgaaaaaagaaatgttcgaggatctgttaggcacttcctcagaaaaacggataatcggggtgttaatttgaaaacctaaccgcaggaaggaggggtaggacatgggtaaaaaacatcgtaaccggatcaccggccaaaaaaagaacaatcatatacctgaaaaagatatcattgcagctgaagaagcacacgggaaagaatattctgctgccaaacgcaagccttaaaactgcagaaaactgcgggtttccgcagttttcttttcattatgtcgtttgtacaatcagacgattgattttcctccagccggcgggaagcagttgataatatgttttcccttttctgccctcgtcaatcaggatcacgtcccctgtggccatgaatcttgcatcataatcactcggaacagtgtcgaatacattaaacaaagagaatgctcttttcagcacgtcttgatgatcgctcccgttcagttcagttcgatagacggctctgtagccctttttttcgccaaaccggggtgtctgaaatattgtcacgtcataggaacaagacttctttttaaacacggataacatcatcaagatcccctccctcttatttctttaacatattggcgtttttgctgtgttttcctctctctatttttgtcgaaaccgcttaatcttttcgtcaaaaccttttactaggaaaaacagaagcaagccgaggctaaagccgcctaacacatccgtcacaaaatgaacccccagatacactctgcttatgccgactaaaacagcaattacaccggctatgatatataccatttttttatgcttggacaaaaacgggaggtgtttcactaaaaagtaagcaataacaggatagacacaagcagcattcatggaatggccgctcggaaaactgaaggatgattcatgaaccagcggtgcaaaatcaggcctcactctttcgatccattcttttaagactttgtttaacagccgatctgtgccgaatactaagagcatcaacaggccgtcccatgtttttctgtagaaaaacatgcctgctccaatgatgacaattagagggagcagaaaagaagaagcaccaagatgcgtgatccccgtcatgacttcattaagccatggctgacggatcaaaacagctgccttgcttattgcttcatctgcagattgaacagcatttgtatgaatggccgcagctagaatgagaaagaaaagaaacaagctaacgggcttgtacaatttaaccacctcaattttcacagaagtcatagaacacgaataataaaaccggagctgaccgctccggttttaagcctcactcatcttcatccagctcttcatctatcatacatttttctatcaaataatcaaaggtaatatcagcgatttcaaacagctcatcctcactcggtatgtagccccgtcttgcaagctctctgtaaaaaaattcagcgatttcttccgtatcaatcacaagatctatttctttcatctccgtaccgcctccttttttatgttttatgaaaaaacaggctgaattatacccggtgttctaaacaattctttcagtcatatattgaataaaaaacgagccatgggaggctgacgctatgattgctaaaatgatggaagcactggacggagaaagatttgatatcataatggaaaaaacgctcaaaggaatgacgcgtgtgatgatttggggctgtctgccatattttttatatgtcttgatccgtatgttcacaaactaactgaaatgctcttttaaactttccaaaacaaacatcatcatgtctttatattcttcatcctgaaacatttcgtacagtattttgtagtcattataaatatccagaagctcatcaacaattgacacagcaaggatgtgaagggtatcttgatcttcatcatcgccttcaaactgaagaagagcagacgatgcgatatcttcgccgatctcatggccagtttctccgacataatggacaaacaacagctgatgcacaaactggtccatttcatattttctaagcaccagcgtgagatcctcttcctccgtttcaagccactctccatcctttaaacgggtcagttcataaatgatatcttcccagccatcttctaaatatctccaaatttctgttctatggccgataatgcgaaagagttcttttccataatcttttacataaacaacgtccccaataaggaattcatactcaatatcaagcttctccatgtcgacaatgacaccctcataatctttataaagctgaatagatgattcaaagtataaaacttcgttatgattgacttcataaagatagtgtttatcaatttggtgcacttttgtgatggtgccgactgttccatacataatgacgactacgatatcccctacttggaatttcggtttattttgcttcatggtgtctccccctcgccgcaacatttctcatacgctatcgtatgccgggtgaagccaattcgcatgggcatgaaaaccaaaggaaatatccaattatggtatgggggacataaaaaaatccgcagtgatctgcggatgaaacagctattatctgccgtgcacttcagactcgtattgatcccaagcttcatcaaacgtcgccatcgtgtgaaggtaatcagcattcagctccaaatatgaactgatttcatgataatcggtagatgtttttggaaagctgtgatcctcatacgcctgattggcaaattcactgatgctgtccttcggcttagggtgcctgtatttcaataaatagtgataaaaggatttcatgggtttcccctcctggtgtctgtcttttgttgttctattatacagttcaagtgtaaaattacaacaaaagaatactgaaacatgactcaggagaagtcaaaatagttgcgtttcaaaattctttctgtctccatgagctgctgatatgtcaggctttcaggcagtttttttgtttgaattaaaagcagctgatcctcaatctcctttaccgtgttttcctcttgataggtcataccgcaggaagaacataccatggcaggggtgtctgtcagttctatagcccttgttccatcagggagctcccagtacaccgtgttcctgccgggcaccgcttcaagctcgccgcaccattcgcatgttttcatgaagaatcccctccgcattcagtctctttctgttttttctgctgcgccaaaaatttcttttctttgagctgatctcttttctcacgccgattttttaatgtttcatgctccggatttgcgatgtatgcctctctccttttgattctgtctacattttcaggtgtaaacgaaacctctttgtcagcaaaaatggcactcagcccgatcggctccttttcgtcagcggtttcagggaaaacggactcaaaataggcgtctgcctgattggggatataattctctggttccggatatgacgtaatcacaccttcaaaatttcttaagatcactttgtcaggactttgtgacaggacatagtttggctgcagggcgattttaccgccgccgcctggtgcgtcaacgacaaaggtaggaaccgcatagcctgaggtatgacctctcagcccttcaatgatctccaaacctttggaaacaggagctctgaaatgcccgattccctctgacagatcacattggtaaatataataaggacggactctgatttttaccaagtcatgcatgagctttttcataattggaaccgaatcattaatacctgctaatacgacagcctgatttccgaccggcactcccgcgttcaccagcttttcacatgcctcaacggattcttctgtcatttcgatgcttgtgttaaaatgggtgttcagccagaccggatgatattttttcaatatctcgcacagatgatcggtaatgcgctgcggaaagacgacgggcgctcttgttccgattctgatgacttccagatgtggaatgctgcgcagctcttttaaaatatattctaaaatttggtcgttgatgagcagcccatcaccgcctgaaattaaacaatctcggatttcaggtgtttcccggatataagcaattgcagcatcaagctgttttttggggactcccattccgatttgtccggaaaagcgccttcttgtgcagtagcggcagtacatggaacattgattcgtgacaagaaacagcacacggtcgggatagcggtgtgtcagaccgggtaccggtgaatcttcatcctcatgaagcgggtcttccagatcgtattttgttttgtgcatttcttcagaaagcggcacagactgcatgcgtaccgggcatctcggattgtcggggtccattaaagaagcatagtaaggtgtaatatttaaggggatcgttttagtagaaattctgacgccttcctcttcatcctcagtcagattgatgactttctttaaatcatctaacgttcttacagtatgtgtcagctgccaaagccaatcgttccatttctcttccggaacgtccttccataactcgatctccttccaatgccgtttcggtttataccatttgtttttcaaacgaattcctcctcgcgcatattttgacttacagttgcttgcaccaaatattcatgttttcaaggccttcggctataaagcaattattgatcagccttccgccattttgataacctgaatggtacaacacagcattcatcccaaaagacgaagcacgggcgagagaaaatacatgaaagatatcctttccagccatttctttttctaacgcctcgattaaaaagcttgttaacgaatggccgcgatattccggcagcacagcgcaatcggttatttctgcatgcccaagctctggattgatttctgcgcttgctgagctgatcaggcggtcatgatcaagcatgatataatacaccgtatttgcattcatcgtcttttcaatataagcggggtcaaataccggtgttgggtacgtgcggaatacttttttatacagcatcgatagctggtacatgtcgtttgtttctgcttttctcatcgtaaaaacgggtgtactgtcgttgcgaagacggggcgctgtgcgatatatggcttcgatgatctcctgttcctctgtataagaatctgtttgtctccggctttctgaaaggtaacgtaccatgacacaagccgaatagccgagataatagccctttagatagccctccggcgcaaataattgtttggcaaggatcggctcatcatgctgcttcgcatagacaatgattttttctgcattctcttcttttgccgctgccaagatatccggcagggccttctcaatagctccgtcataacggaccactctgattcgtttattaaagccgtcatggtccaaaactgctgtgacaccgctactctttattgacttgagcatccgcatcctccccatctgtatgaagcccgcaccaatccatgacaaaaagtgcaataattttagcagattctatcatggcttcaacctcaatgtattcattggcctgatgagccgtttttgtttcccccggcccgaaaacgatcactggtgtatctcctgcatggtacaaaagccctccatccgttccccacggggaagcctcaataatcggctctgtctgtttcattttttgataggctgattgcagcacagaaattaaagggtgatcatcaggtaaatcattcggcagccattgagcgccaaaccattcgacttgtacgggatggcgtttaaaccattcgtcatggtattctaaatccttcagccagttttccaattcaagttttacagcttctggtttctcatggggagcaattccgcatctcccttctataacgacacggtctgcaactgaagatggccaggcaccgcccgagatcgtgccgatattcaccggtaccggtattgggatattgtcatacagcggatctgaaattctcgcattgcggactttctccagctcttgtatcgctgtgataacgtgcatgcttttttcaatcgcgcttaccccttcatagcgtgtgcccccatgtgcggctaatcccttcacagtgatccgaaaccacatcgaaccctgctgcttaataaatagtttcatattcgtcggttcaggaatcaacgccccgtcagcacgatagcctctcatgatggcggacagtgtaccggcgccgccgcactcttcatctacaacactctgaaacaatacatctcccttcaatttgacatcgcaagcgtgcagggcttctaaagcaaaaagaagggctgtattgcctcccttcatatccgttgagccgcggccgtatattttaccgttttcttcgacagcttgatacggttcatacttccaatcctttacgcttccttcaggcacaacatcgatatggccgttcaaaatcagggacctgcctccgccggctcccgtttttttagccacgatattcgggctctcatgaaaatcggatcggttagatttaaagtagggatgctgttttaattgctttatacttggctcccatacatcaatgtccatatgaaattgccgcagcttttcaagcacaacagcttgggcgttaaactctgaccccaatgtgcttttttccccaatcagccttttgagaagacgaatggctttggccgaatgctgatcaagccacccgattacttttctttcaatgtcttgcatcctcattccccctcttaagaaaaaggcatatctattttgatttcagcatctgtcagcctcgtcacctcatcgattgtcgagccattcatcagctcttttaaaatgaagtgatggctatcgacctcaagaaccgctttttcggtaataatcaaatctacacagcctgcagcagttaatggcagcgtgcatctttctgttaatttaggccttcccttttgatctgtatgactcatgacgacaaccacttttttcgctttttgggcaagctccatcgccccgcccataccaggcaccttttttcccggaacaagccaatttgccaaatctcctgattggctcacctgcagggcgcctaaaatcgtaatgtcaattttgccttttctgatcatcgcaaaagacatggttgtatcaaaataagaagccccttttacagcgcggacaggatagcccgcggcgttgcataaatgcgcatcctcttctcccttttcgggactttctccaatgccaaggacaccgttttccgcttgaaacatgacctgcatgtcaggcttcaaaaagttcggtaccaaggatgggataccgataccgagattcacaatcatgccctgcttaatttcagtagcagcccgttttgcaatctgttctctttctgctactcccaagcccatttccacttcactccctcgcttcttacaactccctcaacaaaaacccccggtgtgacaatcatttcttcagaaatctcacctatcggaacgatacgctcagcttcggcaaaggttctcctggcggccattgccataagcggattcatattgcgcgcggttttgtcatacgttagattgccgaattcatctgcaatgtaagcattgatgaaagcaaaatcagccgtcagcgcctcttcaatcaagtatcgttttcccgccactgttacgatgtcctttttttcgcaaaccatttgattatcaatgcccacgtcggttaaaataccgccaagccccgctccgccggcgcgaatccgttccgcaagcgttccctgaggtgaaaattgaacctctaacgtcccctctgtcatctgttttccggctacaggattggaaccgatatgcgaggcgatcagggttttgacccgttgattaacaataagcgggccgatccctatatccgggaaaccggcgtcattgcagatcacagttaaatccgttacaccgctgtccaatatcgcttcaatcaatgaaggaggcgacccgactcccccaaaaccgccaaacatcagaaccgatccatcccgaacatctgcaattgctgtgtcaatgctgattgctttttgaaatgacgccatttaatgtcaatccttttttaagtttttttcgaccgctgcaactgtttctgaaaaaatagagataagctcttccatttcaccgtctgaaatggtaaaaggaggagcaataatgacagcatctccttctccactgtctattccagctttggaaggataaacaatcagcccgcgttttttcgcctcgctgacaataatctgagttatcgtctgctcttgcggaaacactttcttcgttttttggtctgccacaaattcaacgcctaatagcagtccttttccgcgcacatcacctataatgccgctttgagatgccgcctcatcaagctttttcttcagcacagcgccctttttttctgattgtttgatcaagccgtgctttaacacatatcgcaaaacttcaagagcagctttggctgaatagggatgtgcactatatgtgtgaccgctcataatcacacctgacccttgttttatcgtttcaataatagaatcagatacgacggcagcagcaataggcgcataaccggcaccgagtcccttccccagtacagcaatatcaggtacggtgtcccaatgctctgtcgcgagcatccttcctgttctcccaagccccgtcatcacttcatctgcaataaaaagcacatcgtgtgtgcggcatacctcacttaatctctcataatatcccggaggcggagtaatcgctgctcctgcagcaccaataataggctcagccacaaagccggcgatgaattggcttccgattcttttgatcatagtgtccagttcatcagctgcagtctgaacaaagtcttcttctgtctcgtgattcagccgataaatatgtggagctgagatagctggataccgttcaatgagatgggtgaaccggtatctcctttcataaaaaccagataatgaaagcgctcccaaagttattccgtggtaactgctccatcgagacaaaaagatggatttttgtgtttgctttttttcctgccaatactgaatggcgattttcatagctgtttctatcgcttctgatccgctgttgacaaaaaaagaccaattcacatctccgggcagctcctgtgccaagagcgcggctaattgctcggcgggctcactcgtaaactgtgagcggtaagcaaaagacacctgatcaagctgttctttcagcttctcagtcacatcacgaactccgtggccgatattacatgtcaccgctcctgacgagccgtcgagatatttttttccggtctgatcataaacatatgaacccttcgcataactgacaaccggataggccgagctaagctctggcttaatcaaataactgctcatgctcccacctcaaaaccccttttaccatattgtatgagtgtccaaatggcggcatgacgttccccgcaaaaactttttcacataaaaagagccttcctaatagggaaggctcttttggaatttcagcatctagcaaataaaagcggctccaacaataattaataaaatgaacaagacaacaattaacacaaatgtatttgtcccgcagccaaatccgtaaccgtacccagagtatccatacatgctgttttcatcctttcttatcacgatatacggcattttatgcgggccaagtcccaaatggtttgtgcaaacgcctatttcatgtaaggaaataatgaaatacagtatgcacccgctcatattttttaaacgtcagcttttcgtaaaactgagttgcaccgtcagtgcttgcagcaactaagtaggctgcttccattcctagtgatttggcgatggacagcatttctttcactaagatactgccgtagcccttcctttgaaactgatctaaaattgccacttcttcgattttagccgttttctcttgatgatcgataaacagctcgccgcacccaatgggaactttctgtgcctggtcgctgtaacaaacaacaagaatgattatacctgcttcatagaaaggatattttctttttaatttttgttcagcgattgcttctccaatataaatggaatcgtaaattttcataatagaagatccgtcgctaagacttttcgccgtcccccatgcggttaaaggatgtcccatctgccccttccagtcactaagcttcatgtcatatagtagctcatcctcgacgacaaaaccgctttttacaagcgactgcttcaaaccgagcggaaaaacatgctgcggcgacgcttttaaatggagataattcgcatcaagcagctttggtacggagggtaaaaagttaagtaaccgctccaatggaaacgtatcatggagctgaacaaagttatgagaaaaaatttgcggaagctgcggatctctgtatacgctgtaatgatcaaacgatgccgattcagacgttaacaatatatattgatgttccgtttttgaataatgtcctgtcatgaacgtctcctttttatgacctatacctttactctgttgcaatattcaatttctttataatctcatcgtacaccggataaaacggctttccaattggaaattgctgaatatttcggaaagaagcggagattggcttctgatgtaaaaaaaacttccttgttacttgttcactaatcgggtgaaagacgccgtttagaaacaaaaacggctcgcgttcgatgaaaaacagacgtcggccaggcggatttttgatcaattcagatcgtttccacgtaatcggcggcccttccggaagcgcctccatttcttcttttccaattgtcactatgtcttttctttgaaattgataaaattgaaacgcatactggtccacaattcgccttttttttccggcttcgatataaaatattgcaggatggtcagcttcctttactaaaatataattcggaatgtttaaaattttgccaatcctatattggaataaatatgggtctggaacagcgacagtccgatttagatacaaaaaaccccacttttctccaacaggatgccttacaccctgatcaaaaaaatacacattttgatctgaaccttttacaaaagagccgtcaatcaaatcggcgggcagaaaccgatatgcattttgaaatgaatctggggttttataggttgtgtctaatacttcatttatcggcagaaatggggtaaagttgttgagtctcgcccaaaaaattgcgtcgccatgattccaatgcttcatatcatcatcccagtagcctccaaatttatgatggatgagattaagtaacgaacggcgatgcataactgagcaatgatcaacttgaaaagcggcctgatcaagcactgcattggcatttctgtagaaatgtgagatttcctctcccctttcgtttacatgtacaactttttgttttgaatagaccgcctgcgcttcaggcttatgtgaaaactcttgcaccatacggctcagccgctcaggatgataaacagtgtcgtcagtaagataggaaatgtaatcgccgtctgcaaatgggagcgcactgttaattaatgtggcataacgggctgtttttaatcgatctgcaggatgcacgaaactgttatgatattgaatgcgccggtcatggagatacttgtgaatcaccgcagttgtttctgcattcgaatgatcatccatgataaaaagctcccaaagatcatgcgtttgctgtatcacgctttcgatcgctttttgcaaataatcgggtttgttgtaacttgttaaaataatagacactttctctcccatctataccgcctcccaccgtcaaacataaaaacggctccgcagcaagcagagcctctgtcatcatttaaaaagcaccccagcttacaacacttgagagtgaaacatgagctctcgtgttatttaacgggttttggaaaataaccaaatcagtcagaacttcttttacgatgacattttgaagtgtatctccgttgatcaaattgacttttgaaaccggtacgcccagctcttttgcaaaaacaagctggcgtctgaggtcagatggatttccttcagaagacgattgacgtatcagcagaatcagcaaaagcaaaataaaatgcagatcatcttggttttcttctcgatccacttgtttctctaaatccaaatcatccctctcccttatccttatctctgtttcacaatatgtgcgacttcgatttatggtataggctatgtccactccattaaaaaatcagcattttccttaaatagatgaaaaatagatcaggtacggcgttcgactcataccaaataacagccggaagaatatgaataacgtgagttcactatcgaataggaggtgtgtgtaatgagctctgaaaatgcacagttaaaaaaggatttaattaaagccgttttaagccctttatttccaactgcaacagaaggaggagaaaatatggatagtaatcttaaagccttgcttgatgctgccatcgatcaaaaagtagatgaaagtgaaacggttacggcagaatctattttagacccttctcttccggcaagatggatttttgccagaattacgccaggcacgacaatcagcattgtgactgattcaggtgacatgatcggaccggttgttttcgttgctttcgatcaggttcacgggatcgtatttgtaacacaggaaagctccgtcactccggcaggccaagctacaacattaattgatgtagacaaagtagaaagcgttacgttcttttcataacatccgatgaaagtcttgtatatccagtcgggatacggaggaatatacagttattttgatcgctgggctgaagaatgttttcagaacactcatacagagtatatgattgcagataaacctgaagcagaatctttgatgaagatcgaagcgtttcagccggacttcacacttatgatggttggagaccgcgttcctcacgactggctgacctggttaaagggtaaggatatccccgtgtatgtttggctgaccgaagacccattttatatggatatcagccttcaggtaattaagcttgctgacgccatattaacgatagaacaaaatgcagctctctactatcaagagctcggctaccagaacgtctattatgttccgataccagttaaccatcggctgtttaaaaaaatgggcaccgaacattcctatcattcaaatctgttaatcatcggctatccttaccctaatcgggttcagcttacgaaagaagcggtccatctgccattcacggttcgggtaatcggcaaggaatggggaaaatatctgcctaaaaaagtgctcaaacagccgcatattgatgtcgtcagcacatgggttccacccgaacaggccgttcattattataatggggcagacatcgtaattaatgcgcatcgtccctatcattttgctttcaaccaaaatactatgcgcatcaaaaatgccagttttaataaccgaacgtttgatatcgctgcatgcgaagcatttcaattaacagatttacccgcggcgcatcctttttcatcctttatttcttatcacggcatgaacgactttaaggaaaaagccgctttctatatcaaccaccctgaagaacggcaaaaagctgcagcagccaattataaagagatcgtacccgcatttacgtttgatgagcttcctgcaaaactaaaagcgattcatctggcgctctcatgaaaaatcgttcattgctatgaacgatttttttattcatagaaaaaagcagctgcacaagctgctttctattctagccgtcagaacggtctttcagcttcctcggatttacctgtttatgaagatcaggcatttcgccgagatgctgtgcaatttgttcccacgatacaattttgaaattttgattgacggcttgtccgttatcgatattttcgccgtcctgcgccacaaaaatcccgtacggatattttgggccaagtccgaaaccgagaacatcaataccatccgtgtcactagtaccgtctatcttctcgccatctgtaatctcaaagttggctacatagcgatttttcccctgccgttcatacattgcatagctgttatttccttgacttgaagccatgagatatcctttgccatttggtgcataatagattgtcagtccttcaatatcagctgtcaaatgatctcctgtcgcacggtcaacaacctgcccctttgaccctccgccgggctcagcgttaaatttccagatggcttcatcttcctctgctatgtataggttcccatactcatcatccgcaacaaggccttcggtctgagaattcaacttaaattcacgcacctttttccctgttacataaccctttccaccatcaacaatttcatactgctcaaattccccttgtttgcctgtcactaatgcgtaaaatgctcctgttttctggctgtgatacaagctgaatccataaacctcagaaatattggtggaaataggatggttcggatctgtaatgcttttcaattttcctttatccccgtctattgcatatacttcaattgtattttttccttcggaccggttggatgcggcagcaatatcaattttttcgccgttcaatggaaaatcatagcgcagatcgacattattgagcttgccaaactcataagaatgaagctgttttccgtctaaatcatacacaacgagccctgacttcttatttgttgtaatcaacttgcttttttccgggtgtttttcatgaacccaaatggccgggtcatctgctgcatcatcgccagatgcgaccggatctgtctccgtgtgtgcagtcactttgaaatgatgttcctcattcacataatgagccgacaccgaggttgctgtcaggctaagcaataaacccgcggcagtgcttagcagcattgtttttgaaaccttcatttggtaccctcctcttttatcactaacactactattgtaaaatatatacaggtgattaccgtgaggaaaatgaacctttttttatagggtttctgactcataaacaacttattccccaaagaggtggtgagatgactttgccagatttacttttgcggagcgaaataaaaatatgttgaatatttagtacattgtttatttagttttgttttttcctagttacgtccgtttttccattttctattaaaaaagaacactttgtgacatgatcattcccctaaattttgttttattggttgctttcattaattcgattacaaagttgaacatatgatgcatggtagagaaacgagagttggaggataagccatgcctaaacagcaaacagcagaactaaaaccatttttccataacaaaacagttttagtcactggcggaacgggttcaatcgggagtcaaattgtcaaacgccttttgctgcttacacctaaacaggtgattgtattcagcaaagacgacagtaaacagtatgtcatgagccaaaagtatgcggaggataagcggctattatttgtacttggagatgtacgcgatcacagaagggtgaatcaggtgatgaaaggcgtcgatatcgtctttcacgcggctgcgctgaaacaggttccgacatgtgaggaccatccatttgaagcgatccagaccaatctcatcggcggacaaaatgtggtggaagctgccctttcacaccgagtgcagcatgtcattaatatcagtacagataaagctgtatctcctgtgaacacaatgggtgccaccaagctgttatctgaaaagctgtttcatcaagcaaaccgccacgtccaaaacaaaggaaccttgttttgttcggtccgctttggaaatgttctcggttccagaggttcggtcatccccatattatttgaacagatgatggagggtgaacccctgaccatcacagacaaaaacatgaccagatttttcatgtcaatagacgatgcagctacattgacattacaatcggctgctattacaaaaggcggagaaacctttattttcaaaatggaatcactgaaacttgaagaactgattcatgggtttgaagaatatgcatcgcagcacgggctcccgcggccggctgcagtagaagtgggcaagcgtccaggtgaaaagcttcacgaagaattaacatctccacatgaaattgaatcactgtatgaatggggcaacctttatgcgatccttccagagccggaaaaacatcctgactttcgcaaagtcaatctgcctgggtatcaatcagatcaagccccgctcattacgaaagaaagaattgctcagattattgaagaattgcatcaagagaaaaaggcataaaaacaagcctgtctatccattaggcaggcctgtttttaacactttatttattaaagagatgcagatagctttcgtatccttcttcttttagcttatgcttcggaacaaaccgcagcgctgctgaatttatgcagtaacgaagtccgtttggaccaggtccgtcattaaatacgtggccaagatgagaatcagcagttcggcttcttacttctgtgcgaatcatgccgtggctcgtgtccagtttttcttccacttcttcttcttcaatcggctttgtaaagcttggccagccgcagtgggaatcaaatttatccttggatgtaaacaatggcttgcctgacacaatgtctacatacaacccttcttccttatgatcccaatattcattttgaaatggcggctccgtgccgttattttgcgttacttcatattgcatgcgatttaatgactttattttttcttctttattgtacgccatttatttagccccccaatgctcgctgataaatcccgctcgtccggaacctgtccggtagcgctgataatgtgctggattctttttataaaaatgctgatggtagccttccgcttcatagaaaggttcagcttttaaaatgtccgttacaatcggatctttaaagatgccgctttccgccagacgttgcttggaagcttccgcaagctccttttgtttatcattatgataaaaaatggctgcgcgataggaactgccgcgatcagcaaactgccccccggcatctgtcggatcgatttgctgccaaaataattcaagcagtttttcataagggaatacatcaggattaaacgtgatttgaacggcttcacgatgtcccgtcgtttcactgcacacctcttcgtacgtagggttttcagtatggccgcctgtatacccggacaccactttttcaattcccggctgttcgtcaaaaggtttaaccatacaccaaaaacagcctcctgcaaatgtggcgatttcttttttttcagacatactggtgcctcctttgttaatacgtggtattattatattatagcatgtaaaaatagaatgaaaatgattctgcttttcaataaaatctataggttttaagcaatatgcttatgtaatggaggttcacaaatttgaaagtaagaacacagatgatgtacgatatggaaactttactccgtaaagtctttaaacaaatacgcaatgaaatcaatgaaattttagataaagagctgtcgcggaatgaattcaccattcttcgaatccttagtgaacaagggcctaaaaaagtcactgaatttgcgcctattttagaggtatcggcaagccacattacggctgtgaccgatgcgctggtagaaaaggaatggattacgagaatcagatcgaaggaagacagacgcatcatccgcattcatatcactgaagcaggcgaaaaagtccttcagcactttaacgagaaaaaaacggaatatttctttaaacgctttgactgctacactgatgctgaacttgccacgttaatcgagctcttcagcaaacttgataaaaaacggtgaaaaaaagcacataccgatatataggtatgtgcttttcgcagtgcttcacttatttttcagtaaacagcttcattgctttccagcggccatatctataatacaaaaatgccgcgcagctgctaaataaaaaactcattccgattccaagcccgattcctttttgtccaagccaagctgaaaatagagctgtgaaaggatatctcaacacccaaaacgagattaaatttaataccagaacctgcagcatcgctcccgcggccctgacgattccgttcagcacaaaattaatcccaataaaagggtagaaaaacgcgatccacttcaaatattgttcaccaaatgcgaccgcatcaggctcactgataaataaccttatgagatatttaccaaatacccaaatcataaccgcaatcaccagcatgcaggaaataacagctatcacacccagccttgcaattgttcccactcttttttcgtttccgattccaatattttgccctgccatactattgacggccgtaccggcagccattgctggaagcgtgatgatgctatcaagccgctgcaccgcgccaaatcctgataccacgtgatccccgtatgagttaacaacactcataatcgccatcataccgcctgtaatcaccatcatctgcagacctgccggaatcccgagtttcaaaatcagcgcggactcttcccacttgggcattctcggaatcgagaatggcacaagcttgtgtttgatgacataaaacaacccatacaaaaacgcaatgccctgtgacaaaatcgttgaataagccgctcccgctattcccatgcggaacacagaaataaagagcggagcaagcactgtattcagtacaacagcaaacgcaataaaccggagaggtgtcttgctgtcgcccagcgcacgaagcacagtactgataaagttataaccaaacaaaaataaaatgccgataaattgaatctgtaaatacgtctcagcaagcggtatcattgactccggcgtttttagaagacgcagcaaaagctctgagagaaaaaaaccggccgcgccgaatccgatgcttaggcctgttaataaaacaacaaaagcgttaatatacgacgccattccttttacatcatcttttcctttttgctgagataaaatggttaaagtcgcattgttaaggcccaaaataaaagacagcacggtcaaaacaatcgtgcttgataccgcggctgccccaagggcctttgcccccagtaaattgccgatccacaagctgtctataaattgaaaggaaacctgcaatgcgtttccaagcataataggcattgaaaacagtacaagctgtttcagcacgttcccctgtgtaaaatcgtatgctttcatcttttctccttgtgttctcaaattttcttcggaccgcacgaaaaaagagacgttgtttcatgtctcttttttcatgacttatcggttttttttcggtctcgcataccgaatgtaaacaccatcacacttaggaacaaggcacaataggaaacattcaaatacatttgatccatgtcttcagcagccagatgatgataagcaagccagccgaagtacagggaaaatgtaaaggataataaactgaaatactggtaaatctttttcattttcagtcacctctattgtttaggatggtaataggaaaactcaatttcatctttttctaaatttatcttatccgctttgacatacattccattcgttaaaggcatttctgacaaacgcacttcaatgcttttatctccggggtgaacatggacaaatgacggcaattcataaaagctgtccatataatttaacacaaagctaattggtatactcaatttccctaacgaaaatttcgtgacattcagctctacatcaccgttttttttcacggtcggctcaaaagcgataaacgcatcaatagacgtggaaaatgccttgattttccctgcgacatgaacatcatcatcaatctctactttataatcaagcttatttgatgctttgtcgtttaaatatgagttaacaaacgcagctaatgattcttttgtgcttgtcacttgaaatccatactcgctctcagatgaatccttcacctgagcctgttcccccgggagcaaaacaagtgccacaaaaccggcggcgaggataaaattaattgcaagcaatataaaaaacagtcgcttccacttattcatgctgtcaccctactctttcggtaatccttcttttttaatggcttgatagacgcgctttgcgataagagaataacccgtaccattaggatgaaaatcatcttcctcagaaattcggctgctgtcccttttttgattgaacaaatcttcgatatgaacgatttttgcatgtttatcttttttcagctctttttcagcaatatggttccaatccgtgacgacaccatttatttcatttagttctgataatgtaaacgtaaacggattgtacatactgacataaatcagctcagcgtgatcattcagctcgcgaatttcagaaatgattttttcaaagcgcttttcgtacggtttttccgcttcctgaaacggttcaacggttaattgcagaaagttttggcgaaggattttcatcaaatcattaccgccaattgtaaaaaagacataatctgcgtcctttatgcctttttgaacctttttatcttttagtttttctaataaatcatccgaacggttcccttttacagcataatttttcacgtcgaccgttttgacttgtttatctgaccggatagaatccgccaccttgccgacatatccctttccttcgggatctccgactccttctgtcagcgaatctccgacagccgctatgacaatgtgttcttttgttttcgtttcatgggctttttgttttccctcagatgatgtacgtatgctcgtacacgcagtaagaagcaaaatcaaactggccatgattgaaaaaatgcgcagcttcaatcttgttgctccttcccattctactagtggaaagtgtatcatgttttagaagatttgcaaatgcctagtctcttagcttacttgagtgtactggctgactttacatcggaaatgatatcatcgtacggtgtattctccactccattgtaatctttcagcaccttaccgtccggacctaccaaataaaaagaagattgatgaatcacttggtcctctccctccggcttctttacgatcgctttaaagctcttaagtgcgaactcctcaatctcactctggctgtatccagtgagaaaatcccagttatcaaaagataatggataatttgcggcaaatttcttcagctgtttcggcttatcgttttctgggtcaacactaaatgatatgatgcggacatctatattttcggctttcaattttttttgcagatcggtcatatgagcggtcattggcggacatacagtttcacaattggtaaaaataaaatccgccagccatacttttccttttaagctctctaaagaaacgttcttgccgtcttggttttgaaatgtaaaaggctccacctcgtaattgagcggatttttaatctgctgtcctccgcatgcacacaaaaacagaaaaatcagcccagccgttaaccccttgataaccttcatgacatccatcctttccagccagcataaaaacgctttctaaaaccgtccttactgtcccatgtttgtattcgatactgagcaaaaaaaatcctgcatgcctccccattaacgattacaaaggagggcatgcaggtaaaaaacggcatgttacgcgttgtgctttaacacctcttgatgaaatacagcctgataatctgcccacttcatccggcgcttcatataatgtcggaaagaatacacttttgccctgctatttgatgaaaacacttcttttaagtagaattgcaaatggtgatgtaacataaagaaatagtgctcatcttcctttaatacaggtatttctgtcactttcacctgaatcccgtcaccgcgtttgaactctaggcttttgagtaacaagctatcaatcctcttttttgtttttcttctattatatatgatgccagccgggctgtctgtcattttgcgcggttgtgtaaaaaaattagattagcaaatggaacaagtcctcatccttgttcacctctacataatgaaacggttttttgttcatccgttcaatcagcggcccataatcggctttgttctgcagctcgatgccgacaagagcaggtccgttgcttttattatttttcttcgtatattcaaaccttgtaatgtcatcattcggcccgaggacttcgtcaagaaattcgcggagcgctcccgctctttgcggaaagttgacgataaaataatgttgaagaccttcaaaaatcaaggaacgctccttcatttcctgcattcttccgatatcgttattgcccccgcttaccacacacaccacgtttttccctttaatttcatccttgtacaaatcaagcgctgcgacagaaagagctccagccggttcagcaacaaccgcacattcgttatataattcaagaatggatgtacatacttttccttcaggcacgaggagaatgtcatcaacgacagtttccagcgtccggaaggtttcctcgccaatttttttaacagccgcaccatctacaaacttatcaattttatcaagtgtgacgacatgcccagctttgtttgattcaaagtaggatgccgctcccgccggctcaacagcaattacctttgtatcaggagacacgtttttcaaatatgtacctaccccagagagaaggccgccgcctccgacacttgcaaaaagaaaatgcggttctgtatcaatgtcgtttaaaatctcgactgcgagcgttccctgtccggccatcacatccggatcatcgaatggatggataaacgtccgagattccgcctcacagcattcagcagcgcttttatacgcgtcgtcaaacgtatcgcctgtcaaaataatatcgataaatccttttccgaatagttcaacttgagatactttttgtctcggtgtagtagacggcataaaaattttcccgtgaatgccaagatgtttacacgaaaatgccacaccttgagcgtggtttccggcacttgcacacacaactccgttctctgtctgctcgctggaaagctgtttcattttatgataagcccctctgagcttaaaagatctgacaacttgcaagtcttcgcgttttaaatagatattgcattcatatctctcagaaagtctgtcattcctctgcaaaggtgtgtgaatgacaacgtcctttacgttttggtgagccttcaaaatgtctttcacttggatgagagagttttctttaagcaacggtttcatgtacagattcctttcttgttttaaatccctatttaatatgccattataacatgaatattcaaaaaataagacaattatttttatttaataattaaaaaaatacagactatgtccaccacatcttgtggtaacttctgttcaaccattatcctgcagagccaagaaaaaagatgatcgtaaaataaagggtgttttcaaccaaaaggcatgatataatgaaaccaattagaaccaaaaggagccaattgatgaatagtgcaccaaaactcaatacatttcaacatctaatcggagaacatcaaactttcctggaagcgaagcgaatcgccaagcagttctcgttatcggagcttcctgtcttaataacaggaaaaatcggaacaggcaaaaatcacttcgcacatgccatacacttggaatcttcgagaagcaatgaaccgtttataagcgtcaattgcagcacccattcggaagaaacccttattcatgagctttttggccctaacggaaacacaggtgtttttcaaaaagcggtacgaggaaccctttttcttgatgatgtatggcgcatgcctgcttctgtacaagctcagctgttaaaagcgcttgattcagacacggagaaaccgcgaatgatctgtgcttctgcagaccgatctgtggaacatacattcaggcaagacttattctacagactgaacattttaacgctcacactgcccgaattatcggaacgaaaaagcgatattccgcttttgacacagcattttctctcaaattccggtcagcaattgttaatcgatccctccgtttttcccgtgcttgagaaacatgcatttgaaggcaatgtcagggaattaaaaaacgctgcagattatatggcggcagtatcaagcggaggaacgatccagccatatgacctgccgccatatattagaggcgcgatagacggaaaaacgtcgaagaaaaaagcgaagctgctgactttaatggaaaaagctgagtttttgtttattttggaaacaataaaagtattgaacgaaaaaggagaacctgccagcagacggatcatttctgaacacagcaaaaatacccaaacctcgttaactcctcagcaggtcagaagccgtctcgactatttggagaaaaaagattatgtcaccaaaagccgcggacgcgcaggcacaaaaattacctttgagggcttgagctttatagagacgttaaaaaatcaaatgatctagcgatcgaaaggagaatgcacttgtttacaatcaaagaagagatcgccaatgcgattacacacggcatcggtgtcctcttatccatcccagcattagtgtttctaatcatatttgcggctaattacgggtctgcatgggacattgtcagctttacaatattcggtgtctctatgctgctgttatatttgagctccaccctgcttcacagcatcacacataaaaaaacgaaggacattttggagattattgatcatagcgcgatttacgtactcatcgccggaacctacacgccttttttgcttgggccgctgaaaggcacactcggctttaccctgttggttatcgtatggtcacttgccctaggcggaatcgtttttaaaattttctttgtgaaacggtttatcctattgtcaaccttcgtgtatttagtcatggggtggctgatgattattgcaggtaaacctttatatgcttcactgagcggagcgggtttcagcctcctttttctcggcggcattttatactctgtcggaaccatcttttacatttggaaaaagatccccttccaccacgccatttggcacagctttgtattgggcgggagcgctgctatgtttttctgcgtgctcttctattgtgtaaaggtgccgttcctttcgtaacagtaacagaaaagcgcagtcttcacgactgcgcttttttttatgcacgtaattgtttttcattggcaggtatataagcttttgaaaaggacaattcaatgtctgccggttttaagcgtttaaaaaacgagcccttttgcatgttatctgttcctttcgtttccaccatcaccaacggaagatgatagcgggccgcaagttctacaggatcaatagaaccatctagtgaaagaatcaggctttgtcccttttccagctgttttgtcacatcttcatataccttttctgaatccccgtctgaaatcacatccatccgatccagccattgcccgataaaaggcaagcggaacacttttgggttggcgataaagccggccggttcctcaatatatccagcaattaaggccagttcagccaaacgcaaacggggatgcacatacaaaacaggaccgtgtggtattggctctggctgatggatcgtcacaactgaaccggagatgccgatacagccttccaaaaacgcctttggctgttcgtacacaagagtcatctgttttttgtatgacagacggggatcgagcattgtttgattaaataattgtttcatattttttaacagcatatacacaatataaaccactagaaggctgtagcgaaccaattaaaatcctcccgctttagaagaattctttttttcatacattagaaattcgtaatcatacgggtttttttcgtctttggtcccctgctcagaagaaaccaacttccaattggattcatcaaattcagggaagtgacggtcaccctcaaactcgtgatgaattttcgtcatatacagtctgtccgcataagggaaaaggtccgtatagagctgagcccctccgatcacaaagcattcttcagggcctgaacaaatgtccagtacatcctttaatgaaccgacaaccgtgcatcccggaaattctgaagccggcgctgaggtaacgacaatatttttccgatttggaagcggacgtccgatcgattcaaatgtttttcggcccataatgattgaatggcccgatgttactttcttaaagtatgcaagatcattgggcaaatgccacggcaaatcattgtctttgccgataagcctgttggcatccatcgcaaaaatgaatgaaatcatacgcttaccgccccttttatatgaggatgcggatcataatcctcgatgataaagtcctcaaatgcaaagttaaaaatagaatcaacctttctggcgaaacgaagctgcggaagcggtctaacatctctttcaagctgcaaattgacttgttcaatatgattttgatagatatgaacatcaccaaatgtatggatgaactcgcccgattcaagcccagtcacatgagcaatcatcatggttagcagggcataagatgcaatattaaacggcacacctaagaaaacatcggcagagcgctgatacaactgacaggacagcttgccgtcagacacatagaattggaacaggcaatggcacggcggcaacgccattttatcaatttcaccaacattccaggcgctgacgattaagcgtctggagttcggatttgtcttaatatcttcaataagacgggaaatttgatcaatggtttctccatcagctccccgccaagaacgccattgggagccatatacaggtccaagttcaccgttttcatcagcccactcattccagattcgcactccgttttcctgcagatagcgtacattcgtatctccttttaagaaccacagcagttcatgcgcaattgatttaaagtggagttttttagtggtgagcatcggaaagccttcccgtaaattaaatctcatttgatatccgaaagtgctgattgttccggtccctgtccggtcttcctttttctcaccatgctctaaaacatgtctgcataaatccttatactgtttcatttttttcatcctttaaaagtagtcttctagtagtgtaacacaataaaaaatcatttctgaacccagaaatgatttttttatagtcagctgacaacaggcttttcatcctgttctttttcttcatcttgcagatcctgatgcgtatgtgcaattctgctcgccgctgctgcagcaagagctgccacaatatcatccaaaaaggtgtgaataccgtctggactttcatcaagttccttaataattccaatcttctctttatccaaataaccgaaattggtcaaaccgatcgacccgtacacattaacgattgaaagcggaataatttcatctatgccgtaaagcggttcatctgtttcaacaaggtgctgcagcggctcggggagaagcttctgttctgcaagctgatcgagtgcaaggcctgtcaaaacagcatgaataatttcacgtttgttcaggactttttctacattctccatgcaaacactgagcggcagatttggattgtatttttcctgaagtttttgaacaatccgtgcaatatcttctatcataacgccccgtttgttcagcatatcctttgttatatcgaccatttcattcattgtgtactttttcatgtctaatggcatctcctttaggcactcatccagttgggaggcgtgttgcggtcccaataaatgctcccaagctcatgatgtgattgaaatccatcttctgctgtatgataatgaaaattaaaccagtagccgtcatgaggcgggtggtctcttcgcacatggaatctgagaagatcttctccagttgtccgattgtaaacgttgaaaattttttccgttttgcccgctgaaggcatgcttgagatcacaacatcttggtacgcctcatcatcttgcaatgtcgctaaataatcactaatcacattttcgatttttggcaggatctctttccgatagtcatcctcaatgacaggagcgattctgctgccgaattttaaaaaggactgatcctcagcgctgtcaaggagctgttccttgtacgattgaaaaagcagttcaggattttgcctgtcatccgactcatcatcgtacaggtcatgctcatcataaaaagcggtgtaatcattctgctcaagactgctcggctgtccggaaggcttgtccgccataagggcagccggaggagatacgagcccgaacgttacaatggtaaataaaaccacaagggtctttctcatccacaatttcatgactgcttattcctctctattttattgtcatgtttctcttattttagcacatccaaaacatgcaagtcatgtactatatgaaactgatatgcaaattaggagattcgttgctatgcactttgtgtaaaaacgcttacaatattccatgaaaggaggctttccgcatgattgacgctctgtttgccacagtttcactcttaacattattatactttgtcgtcatggaggtcaccgattaacagaaagcccgtgatatgaatcacgggcttgtttgaatgacgccataatggaacagtgctgtttttcttttcatgacgttaaaaccaaactgttcaaaccgcggacttttccagtggtcttttagcacaacgctttttctggcgactcgtaccgcttcattgatacatccttcgtgtaaaactgaatcctctgccaaatcacgtaaaggcgcgatgccgtcagaggtctctacaggttcatgaaacattggatcgaaataaaccacatcaacagagttgtcaggaagctgtttgatgtattctaagcaatcaccattcttcacctggattcttctcatcgcagcttgaagctcttctatacccgtttcccatgaatgcagccccgtcctcactaaaacagacacaagatggtttttttcaatcccaacaacagaacccgtttcgcctactgccatacttgcgataatggcatctgaccccagcccgagtgtgcaatctaaaaacgtatccccttcagataatccggcagcccgaagcataggctcttgctctccctgtaagaagcgtttggctctaaacatcgctgtattcggatgaaaaaagaatttggcaccttgtttcgtatacagctcaaaccgctctttgccgaccacaagcaaatcacgttcagctgacctcagcaggtgttcaaccgtttgtttattccggccgcagtatggcatatttagctctttagaaagctgctttgcggtttttatggtgtgttcagacggtctatagcttgttgttatcatcttctatactcccaaaaagaaaatgcccggaaaacgggcatttagcagtgcgcatcgaaggcagcagtcagatttttcatgatttcttccatatcgtgtccttcaatttcatgacgcggaataaaatgtacgacttctttgcctttcaaaagagccattgatggtgaagaaggctcctggccagtaaaatactcacgcattttcgcagtagcttctttatcttggcccgcaaaaacagtcaccgtattgtcaggtgttttgtcattctggaggactgcctgtgtagccgcaggacgcgcaaggcctgccgcgcagccgcatacagagttaacgactacaagagttgtgccctctgccttttccataaagttttctacttcttctgctgttgttaactcttcaaaacctgctccagtcagctcgcggcgcatcggtaagacaagctggcgcatgtattcttcataagccattgacataaaaaaagccccctctagtatccttcatctgaagtaaaggatactatagagagggccggatttcaaatgttcacgccttaaaatatagaagtaagtgtccccagctgtctagattttcataataccgccggtgttggcacttgtcacaagtttagaataacgtgccaggtagccggttttcactttcggttcaaaacctttccagttcgcttttcgtttttcccactcttcttctggcacttgtacatccaagatacgtttttcaatatcaacgataatatggtctccgttttcaacaaaggcaagtggcccgccctcagcggcctcaggtgatacgtggccgattgagaggccacgggaggctccggaaaaacgtccgtccgtaatcaatgccacttttggtccgagtcccattccaacgatttgggatgttggcgccagcatttccggcatgccaggtccgccttttggcccttcgtatctgataatgacaacgtcgccttcttttacttttcggttgataatgccgtcaagcgcctcgtcctgagaatcgaatacgacagccggcccttcgtgtcttgtaatcccattctgtacgccgcctgttttaatgatagcgccgtccggagctagattaccgaataaaacagcaaggcctcccttttcagtgaatggttgatccagcgggtgaatgacgtcataatcctttacttcatgtccggcaatggtttctccaagagtttttcctgtaacagtcagcgcgtctaaatgaagcgctccttctttcttggaaagctcattcagagccgctgacacgccgcccgcttcatgaagatcttcaataaacacatccgatgcaggcgccagcttggccaagtgcggcacgcgctcagcgacttcgttaatgcgttctaaagagtattcaacgccggcttcgtttgcaagggcaagggtatgaagaacggtatttgtagaacctccgagcgccatatcgagtgcaaacgcgttatcaatcgcttttactgtaacgatatcacgcggtttgatatctttgcgaatcgtttccattaattgcgcagccgattttcttacaaactctttgcgttccggagatgtcgccagaatggttccattacccggcaaagcaagaccaagtgcttctgacagacagttcattgagttcgccgtaaacatgcctgagcaagatccgcacgttgggcatccgaactgctctagttcttgaagctcgttttcgttgattttccctgcttggtaggcgcctaccccttcgaatactgaggaaagggagatttttcgcccgtcacttgttcttcctgccgccatcggtccaccgctgacaaaaatcgtcggaatgttgatgcgcattgccgccataagcattcccggtgtgattttgtcgcagttcggaatacagaccattccgtcaaaccagtgtgcggatacaaccgtttccacagagtctgcgataatttcacggcttggcagcgaatatctcataccgatatgccccattgcgatgccatcatctaccccaatggtattaaattcaaacggcacgccccctgcttctctgattgcttcttttacgattttcccaaactcctgcaagtgaacatgaccgggaacgatatcaatgtatgaattacacaccgcaataaacggcttgccgaaatcctcttcttttactcctgctgcacgaagcaaactgcggtgcggagctctatcgattccttgtgtgatcatattactgcgtaattctgccatggtgatcctcctaaattctttcaattgtttgattggattttattttgaaaattttcagtttatttatgagctgtttttgcaaataagataaattcaggccgccctcaccttgttttgttctttcgtgtttttatatttatatagcttttctttcgatttgaaccctccaactattaatattgttacttactataaatagttttcggatatttttcaacaatattcgaaataatttttataaaaagtgaattcacataaaaaaggtgcatgatctgcaccttttttatttctattcgcctttttttctgctttccgtcatttgtttccaaacagaaccttttgcttcttctccatgctcaatacgttcaagcgccattttgacttgaaggctgacctcaaattcggggtcatcttcggcagcgcgcaaagcttcaattgcactatcatccccgacttcgtacaggaacatggccgcacgccagcgaacaagcttgctggagtcgcttaacgacttgatcatagcgggaatggcttgaggatcgccgatatcagacaggcagtctccggccgttcttctgactgatacagctttgtcctcaagtgctttatacaatagaggcagaacatcaggtgtttcaatcattcctaagtacacaacagcctgtcttctgatggacacctttggatcatccaatgccttctgtaaaaccgggatatcctcttctttcggatccatctgttccaagtgtgcataacgctttttccagtcctcatcatccagcatgtcaagcgttactttatacgctttgcgctgtacagcttgttttgcttcgccctttccttgagcggctgcttcagtcagtcgtttcagccgttcatcactgtatgccgcctgaagctcttctgtcacgtcatggccgatttcattaaagtcaccgaacctgacaccttgttctttccaagcccgctcaaacacaacatttgaagcttcagatctaagttttaagatcgcctgctgaaagcgttcaggtaagccgaagcgttcttcccgctccccatcggttaatttaacttgcataggaatgccgctgaacatctgcacaaaaacttttacctctccaaaagattcttgatcagaacgattttcttctgcgctttcagcactttccatcccaaatgcagtgcggacttgcggtaaaatgtctttccagtcgtatcttgcattccgttcaacagcaagaaaatctgcgacgtgatatacccctttaactccatctattttaaggatttccgctataacaggcggtgcgccttctgcttgctcaggtttatagttattgcttttgcccgccggaagctcttccgttaagatgactttcattgtattcgggcttggtgtaggttcaattgattttatcttcatgatcgtcctcctatagcatatctgtgacttattctatcatagtcgctccaagccttctattacgacgttttggcatcaatcccggatatttctttttctaattggcggacaaactgaagcataaaattgtgtctttcttctgccagttcccgtgcagtgtctgtattcatcatatctttcagccgcagcagcttatgaaaaaaatgagcgtaggcgctttgatcatctccataaaggctatgcccgtttgcgcccgcaaacatgaaagctctcgcaatgccgacagcaccaatcgcatcaagtctgtcagcatcctgtacggcttttccctcaattgagagcggctccttcgccagcttttccctgtctcgaaaggacatccttgttataatatgaatcaccctgtcagcattctcttttcctactccgaaaaaaacgagctggtcatatacttcgttcacagaaagcctgaccgtgtcaggcagcttcacatcaattaaatcatgaaccaaagccgcggtttcaacaatgaacaaatccgctttttccttttctccaatatacgctgcaagatctgctactcttgatacatgatgccagtcatgtccagagctttcgtcagtcaggatagattgaacccatgtcctgatttgctctgcctgcttcaattccttcacaaaaacaccctctttattgctctaatagcttcacgatagcgtcttccagctctttcggatttgtatttggtgaataacggccaacgatttctccatttctatccactataaatttcgtgaaattccacttgatcgccttagttcccagcatccctttcgcatgttctgtcaaatacacaaacagcgggtgggcatttttcccgtttacatccacttttgaaaacataggaaatgtaacaccgtaatttgtttcacaaaattcctgtatgtcagcctcttcaccaggctcttggttcatgaattgattgcaggggaaccctaagatctccagcccctcctgctgatatgtatcatataattcctgcagctgctttaattggggagtaaaaccgcacttacttgctgtattcacgatcatcagtacctttcccgcgaaaggctgaagtgtcatgtctttccctgttattgtacgtacctttatttgataaatagacatgtaagtccctcctatgtccttggtgctgattattttaccttttttaaatcgcaattcaaaatgtaaacatcatttaagaactcataagtaatttgacgatatgagcgtccgttcattatcaattcatatggctcattttttatcttatcattctataaaacattacaattccctctgacatcatggaaaatcattttactgtgaaaccaaaaggcgtgtcagtgcgttttatttaaagagttttctgttgtttcccctcaacacgcatagatagattgaaaattggcgtgaaaattcctataatgaagaaaattaaacggggaaataatggaggtggcacgttgcctattaatataccaacacacctgccggcaaaacaggtgcttgaaagtgaacatatatttgtaatggatgaaagcagagcatttcatcaggatatccggccgcaaaaaattattatattaaatttgatgccgaaaaaaatccaaacagagactcagcttctcagattgcttggaaattcgcctttacaggttcatttcacatttttaatcccaagcacacacacgccgaaaaatactgcgagagaacaccttgacgaattttacacgactttttccaatatccgtcacaagaggtttgacggcatgattatcaccggtgcgccgatcgagcatttggcgtttgaagaggtttcatattgggaagagctcaaggaaatcatggagtggagcaaaacaaatgtcacttcaaccttgcatatttgctggggtgctcaagcaggtttgtactaccattacggtgttgaaaaaattcaaatgccgaaaaaaatcttcggtgtgttcgaacataccgttctttcaaaacacgaaagattggtaagaggttttgacgagctatactacgtgccgcattcccggcatacagatataaatatggaacagcttcaagcagtgcccgatttaaacattcttaccgcatcaaaggaagccggggtttgcttaattgtgtcaaaagacgaaaaacaagtctttttgacagggcaccctgaatatgatacaaatacgcttcttcaagagtatgaaagagatttggaacgaaacctttctactgtcgaggagcctaaacattattttgcaaaaggcagcaacgagccagtgaatcgctggaaagcgcatgccacattattgtttatgaattggctgaattattacgtttaccaagaaactccttatgaatgggactaatttttctttttttagtgatacgctgagcaaaaaatatgataaaatacatctgattcagtctgcgtataacaaaaatttaaaatactggaatccaaatcatttaaaattagcttaactttttcactgcattaataattcgattatgtatttgtgttatgtttatgtatagacaataactccttacgatgcatgaagcttgcttgttgttgattacattgaggtgaatttacttgaataccaataaaagagtattaattttgactgcaaattacggaaatggacatgtgcaggtagccaaaacactttatgaacaatgtgtacggctcggctttcagcatgtaacagtttctaatttgtaccaagagtcaaatccgattgtttcagaggtaactcaatacctttatttaaaaagcttctcaatcgggaaacagttttatcgtttgttttattacggagttgacaaaatctataataaacgtaaattcaatatttactttaaaatgggtaataaaagattgggcgaacttgtcgatgaacatcagcccgatattattattaatacatttccgatgatcgtcgtgccggaatacagacgccgaactggaagagtcattcctaccttcaacgttatgactgatttttgtcttcataaaatttgggttcacgaaaacgtggataaatattatgtggcaacagattacgtgaaggaaaaactgctggagatcggcactcatccaagcaatgtaaaaatcacaggaattccaatcaggccgcaatttgaagaatccatgccggttggcccgatatataaaaagtacaatctttcaccaaacaaaaaagtgcttctgatcatggcaggtgctcacggtgtattaaagaacgtaaaagagctgtgcgaaaaccttgtcaaggatgaccaagtgcaagtggttgtcgtgtgcgggaaaaatacggctttaaaagaatctttgagtgcgcttgaggcggaaaatggtgacaaattaaaagttctgggctatgtggagcgcattgatgagctatttcggatcacagattgcatgattaccaagcccggcggcattactttgacagaagccacagccattggagtgcctgtcattctgtacaaacccgtgcctggccaggaaaaagaaaatgcaaacttctttgaagaccgcggagctgccatcgttgtgaaccgtcatgaagagattctcgaatcagtcacttcccttcttgcagatgaagataccttgcatcgcatgaagaaaaacattaaggaccttcatttagcaaactcctctgaagtgattttagaggatatcctgaaggaatcagaaatgatgactgccaaacaaaaagccaaagtgctatcgtaatggcgtacttgagagcatacgaaaatcgtgtgctctttttatttatattcagccatcaataaaagcggttacatttttttatggaacttgcccttcttttgaaaaataagccgtttcgcaacttgacgggtgctcccagatggtgtatagttgaaccatcatttaacaatgaatcaaagttaaatgatgacaaaattttttttagcacatgggtgctacagtactaggaggaattaagcaatatgcaaaacggtaaagtaaaatggttcaacaacgaaaaaggattcggcttcattgaagttgaaggcggagacgatgtatttgttcacttcacagctatcgaaggagaaggatacaaatcattagaagaaggacaagaagtttcttttgaaattgtcgaaggtaatcgtggacctcaagcttctaatgttgtaaaactctaaactcaatacatgatgatgagatgacaaatagaggagaggcattcgcctctcctatttgattttcatctggatttcaatcgccaaaatgttttgtttgcacctctgttcaatctcttcaacatacttttccattgacggttttccttttttcgcgatatccgccagttcttctaaatcactgtatatttctataaatgttttgtgaaggatcaacttcaagtctttatcatccatagctgcgttccccttctctatcaagatacctcaaatagtaaaacagtcctatttattctggttcaatagttatatcggcttatttttattttcttttctattttggtacataaatttcaaaaaaactctgcaaaataatggcggaggtgtttttggtgacttcagaatttcataaagaggatcagactggctttacggataagcggcagctggaactagcggtggaaacagcgcagaaaacaacaggagctgcgacgagaggccaaagcaaaacattagttgactctgcataccaagccattgaggatgctagagaactgtcacaatctgaagagctggcagctctcgatgatcctgaatttgtaaagcagcaacagcagctgctagatgacagcgagcatcagctggatgaattcaaagaataaaaaccgcagcttctgcggtttttatttttagtgattggttaagacatctccgtattgtttcagcttttcaccaaccgtacatttattgatacaaaatgaatgcgcataagttttgccaaattctttgcgaaactgcttcttaataaaacagtccttgcaatattcatcgtgcagttctgtcagttctttaaagatcattttcttatccaatatcgtcatctccgttacggtctaatttcgtgtggctttctacgaattgatgggatagaatttttttagcgaggccgtcagcttcctgattgtcttttcgttgtattgtttcgtaggttggagtaagcttcagcgattcaaggagtgcttctattttgtcgagccattcattatgagatggatcataacaaggccagctgccgtcaagctgattcagcacaacaagcgagtcccctttgattgtaattgaatttctgcttgccccaagctctcttacttctcttattgcttcataaagcgctgcgtattcagcttcattattggttttcagccggaagcttttattttttctcaaacgatgccggattcctcccaatgaataatagatgacgatcccgagaccggccagttcgctctccttatcgaaactgccgtcaaaataaacagtaatgtcatcaggctcttgagcaagctcctctgtcagcttttccaattccttcagcgtccagctgccgcctttctcgtcttcgaactctagctctttcatgtatggaaaacggccaagttctctggcgagcatacgtgcctgctgtgctgtcagccagtcttcgctaaaaaatgagacggatcccgttccttttgcttctattttcaaatgcggtctgagcttcattacaatcaccttaccattcattagttgccgggcttatgctataatcaaaccaatcttaccccggaaaggaagctttttcatcttgtttaataattcgttttggatcttttttgcgatcattcattttatcattgttcttttattttataaaggatttggcaaaatgggactgtttgtttggatcggttttgcgacagtctgcgccaacctccaagtcgtcaaaacagttgaactgtttggcttaacagcgacactcgggaatgtgatgtatggcacaatcttttttgcgacagatgtgctgaatgaaaaatacggaccagctgaagccagaaaagcggtatggctcggattctcaacgctcctgacgctgacatttgtcatgcagggtgtgctgcttttcgaaccggcttccagcgacatatcacaaacagcgctggaaacgatcttcggattccttccgcgagttgcgttaggaagtctgcttgcctttatcttcagccaaacgctggatgtttatgtatattcggcaattagaaggatatttccttctgatcggcttttatggctcagaaacggcggcagtacagcagtcagccagctgtttgatacattcatattcactgcagtcgcctttctcggcatttatccggcaggcgtgtggcttcatatttttatttctacatatttgattaagtttgcggtatctttgatttcattgccttatgcttatgcagccaaaaaaatgatacctaaagatgaaaggagttcataatgcctacagaaatatacgtagacggcgcaagcgctggtaatcccgggccttcgggtattggcatttttatcaaacatgagggaacagcagaatccttctctattccaatcggagtgcatacaaatcaggaagcggaatttcttgcattaattgaagggatgaagctatgtgcaacgcgcgggtatcaatcggtttcctttcgaaccgattcagatattgtggaacgcgccactgagcttgaaatggttaaaaataaaacgtttcaaccgttcgtagaagaaatcacccgattaaaagcggcattccctctttttttcatcaaatggataccgggcaagcaaaaccaaaaagccgatcttctggcaaaagaagcgattcggctgaatgaaaagaattaaatcttgatcattggttcatcctaatggcgaggtgaactaacatgaaaaagaaagataaaggccggctgaccggcggtgttactccgcaaggcgacctggaaggcaatacacataatgaccctaaaacagagcttgaggagagagcaaaaaaaagcaatacaaaacgctagagaggatctaaacgatctctctagcgttcagcttttcaagcatacgctcaattcctttgatttggtggcggcgaagcatgtcagccgcctgctccatttgcaaagtaaataaagcgtctttcagtgtgcaggccagcggcactgagcaatgaatttccgcaagcttcctcgacatctccaaatcgcttaaaccttgctgaatttttccctgctgtccttttggaagaagagaaagattttccaataaacggtcaatcgtttcgtattcacgaatcagtttgtaggctgttttttctccaatccctttgactccgggatagttatcactggaatctcccataagcgctttaatatcaatcaaagccttcggcattacgcctgtttcttcataaaaagtctcttttgtatagactttataatttccgattcctttttgaagcaaagcaacgcttactttatccgttaacagctgaagtaaatctctgtcccctgttacgaccgtaatgtccgcttcattcgcaaataaatcggcaagagtaccgatacagtcatccgcttcatagccggcaaagccaatattcatgattccaagctctgcggctgcttcctttgccaaatcaaactgcggaatcagctccacaggcggcgcgctgcggttggccttataatcttggaacaagtcatttcggtacgttttgctccccatgtcccagcagcagacgacgtgtgtcggctggaatgtttccacagctgtaatcaaatgctttaaaaagccgttgacgccgttcgtcggcaccccgctgtcatttatcataaagttgcgatgtacggctgtggcaaaaaaggcccggaataaaagagccatgccgtcaaccagcaatagtttattattattcatcaaataactcccttttctttcattccttctattttatcataaagcagcccaaaaataaaaaacagtatctctttaattagagatactgtttggatatttatcaatcgttgtgtcttttgttgctggcgatcagcttttcagcttcgcgtcctgcgtaagagtcaaaatgggtttgaaatccgtttttctttttggcattgttattcgcctgtgcatttctgtttccgagctttgttctgcccaacatgaatccccccttacgtcggatgcatatagtatatgcttccggcaggaggttcactcgcgacaggatcatccagcttacatgcggcttacgtattctctgaccatttcttttgatacaagccgtcttgtcgggacgatgccttttttagcgagctgattcatttgctcggtaatttcattaattgcatctgtagtataaggctcatcgtttctgcatttagcaacagcttcttcaatcgccaattcacgcatattttcaagacgcataaatgctttgatatgctcgtgctgttttgatgaatgtgctgaaattgctttatgtacctctgacattaatcgttcatctcgcttttttctatttagtctatcatgacttgaaatacaagccaactgaattttacatttttattgtattgtctgaatttttccaggagatgcacgcctggtacgctatttcaatctctttcgcatgttccccttccgcatatcctcttaaatatgtctctttttgatccgttatttgcgcgattgctttttcacccatatcttcctgtaagcgtctgaggtgagctgtgtaatgagagatcaggctttcttcttcattttttatccatgcctctgtgattttcgtaagtttcatccgtacagcttcgataaaggccgattttcctttctgctcaaaaaactgcttcggtgatttgacctcttttagttcctgctcaaaagcacgttcttctatttccggttcaacttccttcaactgtatgccgttcgaatgctgatcacccgcataaacggaaaaataaccgtcctcgtttaatgttttttgaaattgatccagccattcttcattgatatgccgttcgatgaaaccgctcatgcgaacatcaagcgttttgatttcctgaatatattcaaattgatattcatgtaaggctgttgtcatcgccttactgacgttctttttccaatccccgttttgcagcccgggatgaaatgccgattttaataaatcatttgcaaaatatgataatcgctgtgtaatgtgatatagctgctctcttgtatctttttttactttttcaatgatggtttctgagttccgccgtttctcgatatcggccgctgtccgctcaaatgacagcataaggcgctgtttctgcgcttccttctcttctcgggactgatgctgggattggtgaagctgaaaaacagtttcgcatagtttgtctgcctccgaactgagctgcgctgctgacgctttttttacatccacttcgataaaccggtctaagtgttttcttactttcgggaactgattataaaatgactccggttttcccaccagttcctccttacttgatacggtaaagagctgcggctcataaaccccttcttttacaagctctgcgctgacataatcggtcactgtttcgagttctgttttatcttttgcaaggtctgcagcattaataataaaaaacattttatccatgctgagcgattctttcacaagtccaagctttcgcaaaaatgaacggtctccttttgaaaaagagtgctgataataagtcatataaaaaaatgcatcggcatctttgatatattggaatgccagttctgtatgccgtttattcatgctgctcgcgccgggtgtatcaacgatcgtaatccctttttcagtgagcgggcatgtataatagaccgttacctcttttacagcacaggccgttgtttcctctgctacatacggctttaattcagatagcggaatcgttaatttcttctgttcctgtatatactgctgatacttctcgtatgcaagcaggaaattgctgatcaatttcacgtgttcttcctgcagcctgttttttttgactgccttttcccacttctctgtgaaggaacggcctgccggttcctttggtattccggtgagctgcaaaatttcagccgttatgtcatcctctgtcttaaacactacatccgctgttttgtttaagttgccattgattggcattgtgatcttgttaattgtcgctgtggttggcgttggtgaggatggcagcactctttcgccgacaagcgcattggcaaatgatgatttccccgagctgaagcctccaaaaagagcgagtgtaaatttccgttcctcaagccttttcaccctttcacgaaacgctgaagtttgctttaacaacatgctgcattcgcttaaaaggtcagacaaagtgtaaaagcgtttgatttggtcttgaagcggcatttcttgttccattttgatttctgatttcggcatcggctgcgccgtcagctggcttcggccttgtttctgctctggagccgccactcttgttttcttcgatttaaaccattctgtgtctatatgcatggggcatgcggactcttcttcccaaatggcccacaggcgatcggttttctctcgggcattattctctaaacgcgcctgttcttgaagaaagacaagtttttctgattcttggacgagcctgtctttaattgtttgcacatctttggaaacacgctctttcaccatagcggagagcacctttatgatgtctgcggcttctcttttcgcctctttccggatgagctctgccaagtcttttgtatattgcaatacatattcagaggaaaaggctgcaccatgcttgaccgcgcgttcaatgatgcttatatcaagcggtgtgcgataggcctgaatcagcttttcactttcagcggtatagacatcaaataccttggcgagtttatgaagcgtgtctatcatatgccaatccgcttcgggctctgttcgttttgccacatcagagaaaaaagcattccgccttttatctctttcctgtgcagttttcgctttagaaaagaaaaagccggttttaaaggaaggctcttgtgattctaaaaatgcagccgccaattcacgcatttcaaaaggcgtcaggtttgcgttttttaaaatacgattgatttcttcctgcatcctcgtctctgcctcagtcgtttgtttttcggcctcattcaattgatcacgcagcgattggaccagtccaatttggatattaagctgttcagcgaaactcggagcgcctgtttcgtctttcttcagcatttccgtatgttcctttagcagattacggactttttgttcggttaaagcctgcatattgctttttgattgctgttctattcttcttaactcttctctcaggacccccatctgattgaacgggtggtccggttctgttactgacgtaaaatagagcgcttcctttgaaatcccttcattgcaaagcatctcctctacctgcgctttatagtctccaaatttcgtctccgtctcatcatggcggtcaatttgattgacgataaaatacacattcggaatgctttcttttattgatctgagaaactttacattttcctcagcgtgcacgtgattatagtgaacgacgtaaaacagcgcatccgcttggtgaagaatagaagcagccgatagaaaatgagcatcatctgttgaatctatccctggagtatcaatatacgcaaccccggaatcgatctcagtatacctgtcaaaaatttcgacgctttcaatctgttccccgtctttacaatattgctgcaccttgtctttctggtaagccccttccagctcagcacacgctccgtctgttgtatgaagccgaactcgcttttccccgtttctgatcacaacaaggttagcgcttgtcggaatcgggcttgtcggcaaaatattctccattaacaggcagttcagcagtgacgattttcccgctgaataatgcccggtaaacgcgatataaacctcttcatcagccgcttttttcatgaccgcagccagtttagcagccctttgttcatcttgattctcaataaattgcttataaatttccccagttttatgcaaaagctcttttctgttttgatctgtcataagtctgaacccctttgtgccgtttcaattgtgaacctttttcgaaagatctgaattcattcccttttcattttacacaagaataaaccaaatttctttaggagaatagaaaaaagccgccattacggcagcttctataaaagaaaatctgcaacttttacaagttccagattcatcaaacagatttattagagattccttttaatacaaaaccaattaatacactatatgtacaaaccgctccaagcaaaaacagcattgtcatttgcttcaccatcctgattgagaatctttttcaaattcattttaacatagttgagaatgattttcaatcgctattttatgctgtattcctgtaatgctttgtcttctgcgcgaattctgacgcttaacaacacggcattgaaaatggaaaacagacacatggtgacgtatgcttgataaagcagcggaatcagcaaaatttcgagtataacaacggcatagtttggatgtttcatccatttatatggacctttttttacaagctctacacctggaacaacaaggattttcgtattccaatatgcccctaaggaacaaagcgcccaataccgtacgatctgtacgcttaaaatcactgcagcgataccgagccaccagctggacggctgtttattcatcagcagcacttcggcaattaaggacaggaaaaaaaggatatgcatcgtaatgatatatggatagtggctctcgccaaattcaattgctccttgcttctttaccttttgttcgttttgcctggccactgccatttctgctgctctttgaacaatgagaatggcgatcatcaaccaaaacatgagtcaagcccccttttcccagctgaataatagcaactctgatgagaagcccggccctaatgcgccaatcagtcctcgttcatcttcctttttatgtccgttctgcagatggtctttgatcacatacaagattgtggctgaagacatatttccgtgcttttgcaaaatgctttgcgcagatgaaagcttttctgacgacagcccgagacttttgatgtatgcatcgatcactttttttccgcctggatgcgccaaaaaaacactgatatcatggaatgacagcttatgtttgtccaaaaaaatctgtacatttgttttgagccatttttccaccaaggtcggaatgtctcgtgagaaaatgactttgaatccttgatcggtaaagtcccagcccatgacatcttctgattgtttcatcaaaacagattgggcgtccattatcttcggcgcaagcttcagctttgacatcctgcggtccgccttctctccgcataataaagctgcggcaatgccgtcaccaaaaagcgaggtgccgatcagattgcttttcgttttatcttccggctggaatgtcaggctgcacagctcggcagcaatgacaagcacaaaagcctcaggatacgctttgcagtattcggctgcacgcgcaagtccgctggctcctcctgcacagccaagcccccaaatcggaatccgcttcgtatatggagaaaacggaagttcattcataagccgcgcctcgatactcggtgtggaaagacctgtactggagacgaaaaaaacagcttccactttctcataaggaatggcttcttgaaaaaattccggatgagagaggcactcacgaacagccgctctgctgtgtttaagtgtttcttctatgtatatttgatttttttcttcaaagctgtgcccctctttataccattcaatcggcttaacaaactgtctcgaatggatttgcccgtttttaaaggaggataacagccggtcaatatccttaaaagaatgctgaaacatatagcgggcgaactcggccgctttctcttggtttacattatacgcaggaagacttgttccaatggataaaataaacgccatgcgatcacctctttgcatacattgtgccgcaacaatcttttttatatgcaaaaaaactccgccgcggcggagttagactgctgttttttgttcagcgaggtcagcttcttgttctatttttttagctttagaaaaaaagttatatacaatatttaagacgactgcagtaaagctgcccgccacaatgccattcgttgtaagcagcgttaaggcactcggaagctgtttgaaaatatccggcacaacggtcacaccgagccccaatcccactgagcaggcaacaatcagcagattttcctgtttcgcaaaatcaatgcggctgagcattttaatcccgtaagcgatcaccattccaaacatcgccaccattgcaccgcccaaaacagcggatggaataatggtcgtaaaagcagcgatctttggaaacagcccaaatgccattaggatcacacctgtgaccacaatgacggcattttttttgatccctgtgagctgaacaagcccgacattttgagagaatgccgtataaggaaaagcgttaaaaataccgcccagaagcacagccagtccttcagctcgatagcctttagacaaatctttctctgtcaaacggcggtttgtcaggtcacctaaagcaaagtaaacaccagttgactccacaaggctgacaattgcaacgatggacatcgtaatgataggcgctgcatgaaaagacggcgcgccgaagtaaaatggctgaatcatttgaacaactgccgcgtccgaaacattatcaaattgaacttttcccataaaatatgcgatgaaggtaccaatcaaaataccgatcaaaatcgagacggacttgataaagccttttgtaaaacggtatagaagcacaatgatactcaacacggtaaaagcaagcgcaaggttggagagatctccgaaatctgcacttccttctccgccggccatgttattcatggcaaccggcatcagtgtaataccgataatcgtaacaacagagcctgtcacgaccggcggaaaaaacgatacgagctttccaaagaaaaatgaaataagaatgacaagaatgcctgaagcgataatgctgccgtaaactgttgaaaccccatattcagatccaatcgctatcatcggcgatacagctgtaaaggtacagccaagcactaccggaagcccgatcccaaaaaatcggttgctccacacttgcagaagtgtagccacaccgcacataaaaatatcaattgatactaaataagtcagctgctcgacggtcagtcccattgcttttccgacaatcagaggaacaacaatggcgccggcatacatggcaagaacatgctgaatccctaaagacagcgttttgccgaatccacttctcatgaatgaacctcctgtacgaaggacacttttccttcttctaaagactgaattcttgccaaagattccactcgatagcccagtttcacaagttcatctcttcccggctgaaatgacttttcaataacaatgccaattcccgcaatagaagctcccgcttgcttcacaatcgacacaagcccgtgcgctgcctgtccatttgccaaaaaatcatcgataatcagcacatgatcctgatccgacagatgggtcccagacactgcgatttggctttctgtttgcttcgtaaaggaataaacagacgctgtcagcaagttgtcggtgagtgttaacgattgatgctttctcgcgaagacaactggcacacccagcttcaagcccgtcattacagcgggagcgatacctgatgattcgattgtcacaattttggtaataccgtcttttgcaaacctggacgcaaattcgtcaccaattctctgcataagcagcggatcaatttggtgattcaaaaaagaatccactttcaatacctgatcagataatacgatgccttcttcctctattttccgtttcagtgcttccatcctgtctacctccgttatgagaataaaaaaagcattgcccgctcaaataaagagcaagcaatgctgatatcacaaaaaaccgtacacgtgcggttccattgctcacccatagtcggacatttacggtgcccggtagaaacttgcgtgccatatccacgcgaatatatgagtgttcctattatattgtaataaattatatcaagattctaatctcttgcataggctgaaaataaaaattcccgaactttaattttgtttttttagatatcattcgtatttcaaggggattcgatataaaagagcctgacgacgcgccgccaggcttttgattatgacagatagagatttgaatatttgtttgataaataatcaattaaatagcgaacattcagctcttctcctgttgcatctttaataatgtctaacggctttttccgttttccgtgaatgtgcaccttttccgtcagccattgctttatcggatggaactctcctctttccaagagagcgtcaaattcagggagatcctcaagcattttttgtttcagctgagccgcatacatgtagccgagcgcataggatgggaagtagccgaaatctccacctgcccaatggacgtcctgtaaaatcccctctgcgtcggtctgcggtgtaatccctaaataatcctggtatttttgattccaaagcgacggcagatcttccacagacacttcattgctaaaaatcgctttttcaatttcataacggatgatgatatgaagaggatacgttaattcatccgcttcgaccctgataaatgaaggttttgattcattgattgcccggacaaaatcatccagggagatgtccttgaactgttcaggtgatgcttcttgaatcttctgatagtacggtgtccaaaaatgcttgttgcggccgataaaattctcgtaaaataatgattgcgattcatgaattcccattgatgcgccgtctgacaagttcgtgccactgagtgcttcatcaatattttgctcgtatatcgcgtgcccgcactcatgaatggtgccaaagatcgccgtccggaaatctttttcatcatatctcgtcgtgacccgaacgtctccccggttcagcgtagttgcaaacggatgaacggtttcatcaagtcttccgccatcaaaatcgtagccaagctcctgtaaaaaatacagactgagctctttttgcttttctttcgggaacgcttttgtaagaaagcttgtatctggtttatttccggaagctgtcacctgtttaacaagagggataatcgcttccttcagctcagcaaacagctgatcaagcacctttaccgtgacgccgggctcaaacaaatcaagcaatgcatcataaggatgctcttgatatccccaatacgtaataaaacgtttattgaattcaatcagctgttctaaataaggagaaaacaagctgaaatcagattttcctttcgcttcctcccacgctgtttctgcctttgaacacagaattacgtattctttgtattcagcctcagggattttcttattctcttcatactcttttttcgccagttccactgcttttttcgtatcttccgacaagtcatcaaatcgttcatacaggacatcgataagctccttcattcgatctgatgtttggatattgaatatatctgttgaaagctggccgatgctttcggcacgatcctctgagccgtttttcggcgcgcctgttctggagtcccagtgcattaacgcaactgcttcgctgtaatgtgagattctttttaaaagatcaaaaaattctttttcatatgtatgtatctccatatccattccctccctattctagccgttccattacaggctaatggaagggggtatgaaagtcaaattgtttgtataaaaggctgccggtatgttttgcggcagcctttttattcagttgatcgtcatttgattttttggcggaggtgttcttcgctttttctgcttgatttttttatccacccacactgttgccagcggggttaagagcgaggtgacaataacgcttgtcgctataattgcagttgccgactcagcaactggcgcaaatgaggcattcgcttccgctaatgcgtatggcacggctacagccgcccctgccgtagaagaagcggccacacccgcgacaccgtctccccgcgcgacaaaacgatcaagtaaaaacaaggaactgcccgataaaatgacgacagaaactccgataaaaatgccgagcagccctgattggatcagcattccaaaattcaaggtattgccgagcgaaaaggcgaaaaatggaatgatcgccggcacaaccttgctgaataagtctctgagatcgtgatccagatttccaagtatacatccaagtaaaaacgggataactgtcgctgccagcgtttcccatgggaatgcggcaagtcccgtcacaccaaacgtcaccatggtcataaaaggaccagattctgtactgataaaggcgaaagcgcccgcatcctcttttcttcccatgtgattcatgagcgccaaatacagtccgccgttcgtttcattcattaccgcgacaattgctaaaacagaaaggcctgcaaaaaagccggattgtatgccttcgtcaggtataaattgcgctgcgatcacgccgagcagtgccgcaaatccgacctttcccaataataacgtgattccttttcttgcgatatagcctgaagaacgaaaatcaatcgttgctcctacgcaaaagataaaaacacccagtattggcagcgttccggtaatcaaagcacccgtaaaccctccaaagaactccgctgttccaggcgcaaacgtgttgagcgccgctccaagaaatagcggaataatcatcattcccccaggtacccgttcaattgtcgccttgattttcatattgtggattctcccatcctccggttatgaaaaaacaatttcacttacacttggaaaacagcctgcaaatcctcttttgaacagctgcccagctggctgccgactccgacggcgccagctccggctctaagccaatccggcacttcagacggatgtatcccgcctgtcggaataaaggtcacctgcgggaaaggacccgctaaatttttcataaacgggatgccaaacacaccgcttgggaacagctttaatgtcgtaaaaccgaatgtcagcgcttccataatttcgctcggagtcaagacgccggggatataatgtgtctttacaaaagatagatgttcagcaagatcagctgaaaaacccggactgacaataaactgcgcgccagcctcagcagcttccccagcttgctgcgcggtgatgaccgtgcccgcgccaattaaaatatcttccctattacggaaggattcgataatatctgatgccccgggggtcgtatacgtcacttcaactgcacgaatccctttatctaacaaactctcaatctgctgacaggcctcctgcgtatcctttgaacgaatgactgcaatcagctttgcttctttcagacggttttcaacgactttggactccatattaataatcccctttcttttggtgaaccgttctttgagcagataaaaaagaagctaatttctccctggtcggcaaaccgtccatatcccccggtgcctgcacttgcaaagcgccaatcgcatttcccctttgcaccgcatccttgtacgacaaaccgtctaggataccgctgattacaccgactgcaaatccgtctccggcgccgaccgtatcaaccacccggtcgacccggcagccttctagaaatccttcacttgtccccgttttaaagtaagcgccttcttttccaagtttaatagcaacaaagctggcaccttttttcaaataatagtcggcaatgccttcaggtgttttttctccggtcaatagctctccctctgcgatacccgggaaaaaccagtctgcaagcccagccagatcattgattgtgtgtaccattgttgcttgatcaggccaaagcgaaggtcttacattagggtcgaatgaaatggtcttccctgcgtttctcatgtcgttcatgacatgatacgtgaagtctttcatctcggctgacaaggcaggcggaatgcctgtcacatgcaaatggcctgcgcattgaaaataatctctcggatattcagctgaagttaatgtgcttgcagctgagtttttcctatagtaggtaacttgcgggtcgccttctttcacttttgacttcagcagcagcccggtgggattttcgtcctgcgagcggatcacgcgggacacatccactccctcttttttaagttcctgtacaataaacgttccgagctgatcattgccgaccttgctcatccatcccattcgaaacccgagtctggcaaggccgcaggcgacattgctttctgctccggcaagccctttagaaaaagtggatacttcatgaaggcctccatactcatttgcataaaacatggccattgattccccgaatgtcaccgcatcaagcttcatctcttcccaacctcctcttagttgagggcacctaggattaaagtgactttctcatgatgacttttgcctctaattcaatggtttgaggcgctcctttgtcaccttcaatcctttttaatacacgttccatcgccgtcctgcccatatcatgtgacggctgggcgatcgttgtaatacctggaccgatcagtttataccattccgtatcatcgaatcctgcaatccctatatcttgagggatgcgcaggccaagctcttccatacagctgatgattttcagcataatcaagccattcaaagccagaatcgcttttttttgctccggcatttccttgtgaaaagaacgaagcgccgccttaagctgctccttgtcctttacgtcaatttcaagcaatctgacaagcccgttcacattatgaaccgaagccattttctgatacacagctgctctttctgcacgagggctgatagaggaaatcggttcggtaaacagcgcgacatcagtataccctttgctgtacaccttctgaagaatctcttttgtgatccatctgttgtcagtcgttacggtatccagtttcagatccggcagtttccggtcaattaagattgttggaatttgctgttcagcaaaagcgcgcagtacatccttgttttcccctgttgcgtttaaaatcaagccctcaaccgaatgggcttctagctttaagagcatttcccgctctttttcaggactgttatctgtgttgcacaccataatgctgtatccatattgatcacaaacctcttcgactcccctgaaagcagcgaccgaaaaaggatttgtaatgtcagctacaacaaatccgattaacttgcttttttttattttcaaaccttgcgccattttactcggccgataattcaattctgcaattgcctttttaatgtttttcactttttcaggagaaatcgcgtcaatttttccgttaatatagcgggaaactgtcgatttcgaaactcctgcacattcagctacatctttgatggttgtatggcctgttgttttctttttcattcaagtgctcctgtatctcttatatttgaaaccgatttcaaaaccgttacaacaaaagaataccataattttaaaatttgggaagagtttttttaataatgtgtcaattcattattttttcgttgactcttttcactatttatcctaaaattttctttgaaaccgttaccaaaatattttcattcaagtgatgctgaaatcctaaccaagggggaaatataatggaaaatcgttattctgtacatcctgaacaagtaaaacgctttacaacagaggagcttcgcagtcatttcttaatggatcctttatttacagaaaacaaacttacgatgtattactcacatgaagaccgggttgtcatcggcggagcggctccagggcaaagtgaactgaagcttgatgcaggtgattttctaaaaacagacttctttttggaacggcgtgaaatcgggattattaatgtcggccagcctggtgccgttagagtcggcgatgatgaatatgtgcttcaaacaaaggattttctctatatcggaatggataatcaggatgtatcattttcaagcctgaacggggaaaaagcgaagttttacttcgtctccgcttgcgcccacaaaagctatccgacacaaaaagccgccctagctgaactgacaccggaccgccttggtgatgatgcagcgtctaatgtcagaagtctgtacaaagtcattcatcaggatggcattaaaagctgtcagctgatgatgggaataacgatgttagatcaaaacaacaactggaataccatgccagcacacgttcatgaccgtcggatggaggcttatctttatctggatcttgaaaaggactcaaaggtatttcatttcatgggccagccggacgaaacacgccatcttgttgttggaaatgagcaggctgtcctttctcccgcctggtctattcattctggcgcaggaacatcaaactatagctttgtgtgggcgatggctggagaaaattacacatttacggacatggatctcgttccgatggatgggctgaaataagatgggttatctacatgacgccttttcattagaaggaaaaacagcgctggtgacaggccctggaacagggatcggtcaaggaattgccaaagccctagccggtgctggcgctgatattatcggcacatcacataaaagcagcctgtctgaaacacagcagcttgtggaacaggaaggccggatatttacatcttttacattggacatgagcaagccggaagcgataaaggattctgcagctgagctgtttgaaaacaggcagatcgacatccttgtcaataatgccggcattattcatcgggaaaaagcggcagattttccagaagagaactggcagcacgtactgaatgtcaatctacacagcctgtttattctgacacagcttgctggcaggcacatgctgaaaagaggtcatggaaagattattaatattgcctctctcctgtcttttcaaggcggcatcctcgttccggcttacaccgcgagcaaacacgctgttgccggtttgacaaaatcatttgcaaatgagtgggcagcgtcaggtattcaggtcaacgcaatcgccccaggctatatttctactgcgaatacaaagcctattcgggatgacgaaaagcgaaatgaggacattttaaagagaattcctgccggccgctggggccaagcggatgatatcggggggactgcagtctttttggcatcacgtgcttcagattatgtaaatggacatattttagcagttgatggcggctggctatcccgctgacaaataaaaaaagctgacgaacgatcgtcagcttttttccattacatcatgtgcggttcaacaggcaagacctttttgacctcatcaatgatgcgttcattttctccgccagcgtaaatgtgaattgagccgctgtcttgattcgaacgaatcaggcgcccgatgccctgccgtacacgtaacaacatatatggcagatcaacttcttcgaacggatcttttttcgctccgttgcgcttcgctgtaaatacaggatcgtgtggcggaaatggcaatgaccaaatggtaacattcttcaatgcgtcaccgggaatgtcgagtccttcccataagtgaactgaacaaagtactgtttcctcttcctcttggaatttctctactaagctgctgatttcctcatcaccttcgaagaaaattggatacggcagctcccatgccgccgacagctctttaaactcgtttaattcttcaaaagaagggaaaagcaccagcgttcttcctttgtaacgtttgattgtttcaatcgtttcagccgttttttgttcagcggccatatctgtttttgcgtatagattaatactcatttgctcgtcataatcataaggggaatcaacagttaatgacaaataatcatgaatcccaagactgtcggcaatataatcaaacgaaccgccttctgacagcgtagcagaagagaagatataaggaattttcttagaaaacactttttcgccaagtacttctgctaccgttctcggcatcacgacaaaggttgattctgcttcctttttctccagccagctgatcgcatccttttgatatagagataatgaatacgccatttgttcaacatattcttccactactgacagttcgtattgatcaatcgtatacatttcagactcaaatacaagtgcctcaccgattttatcaagtaaacggcaaagctcgtccgccgcctttttgacacgatggtcattttttatttctaaacggtgtgaaccggctacttcctttgattcttcagaaagaacatagaaaaattcgtcgtttgcgagaagcgcatcttcaatcaattctgcaaactcttctctgatgtcattttgcagcaatcgttctaaaaacaattcaagagtagactgcttcactctataggttagcgctttttgcgcagcaaactctaacaagtgcccctcatcaaatacaactgcactatgatcaggcaagagcggcagctggccctctcgtttgcgtgattcttccgtccacacatgctccatataaaaatcatgggaacatatgattaagtccgttgacttgcgatagtaatctctggaaagtgtcagaccgcatctgtgtctcatatcacaagtcagacagtcctgaaacgagtcgtagcttacgtcagaccactcttcattcgatagatttgcgtactgcttacggtcgccatacggataaaagcgctgcatcgcctgtgactcgtggacaaatgacggtaacgactcataaagatccagccatttatcatcatcagaacgctgcattgttttttcaagcttcttcaagcataaatattgctcatgcgattttgacagccttgtatcaattttcagatcaagatgctcagccagcttagaaatatcgccctcttttttcactagctgttcaattaatgtttcatctgcacaagcgatgatggcgggtttgccgacataccttgcatagctgattgcaaaaagaagatataccagcgttttccccgttcccactccagcttcggcgaacatgacttttttctctttaaacgcccgctccagctgaaaagccataaatacttgctcgtcccgaagatcaaaccctttttcgggaaggatatcgtaaaacacgtcaccaatccaattgttcaattcttcataaaaattctttgttttcgttaaagaaaaaggcaaacgtgatgttgtcacctagttccaacccccaactattcgacattcagaccaccaataatatcattttccgctgatgaatacaataaaaaaacttggcaatgccaagttttttgcagtttacttacgattgatcacatgcgacgataaaaaaggatggtctgttgaataaatatgttctaccgctttttctaaattagtttgcgcatgcgaaatcatagacggagacgattcagtcccgagctccttcagctcgtttgctgttgcgtcaagcgccctttgaataagattaaaatgttcgctgttcagcatgagatcacctctgatggaaataatcatcattgtatgcgaacttttcattttatatacatgctttaccgcatgttatcaccgaaacatgcacaaactacacttgatattccgtctccggattatccgtcttatcaacaatattctatcagggagtgatgttgacatgagttatagaaaccgattagatcagcattctgaactgttccatcacaattggacgcggcctaaacgttctaagtctcaagtaaacggtcacactgaaatgtcccaaaccaacattatattgagaagcaacgcgaaagctcaccgttggtaacgatagaatagggctgaaagatgaaagaagacgcatgcagagcgtcttctttttatgcgttttctgttttcttgcgctgcggccttacttttgaccaatattgataataatccgttttaataaacccgttaaagagctttcgtttcttcgttgcttttctgccatatgcttcctcaaagttttcatttgatgtcagcatatacacagaccaagtatcaagcggctcgaacgccttccccatttctttgtacatctgctcaacggcttttttctcgccgagacgctctccatatggcgggttgccgacaattacgccaaattccagatttgtggtaaagtctttgacctgcatctgtttgaactggattagatctcccaatcctgcttcctctgcattttcttttgcgatttgaaccatgcggtggtctatgtcgctagcgaaaattgtaagcggctgatcataatttgccttttcttcgacttcaagccgcgctttgttccacagatctttaccgatccattcccaatcctctgaaacaaaatcgcgattgaatcccggggcgatgttttggccgattagcgccgcttctatcgcgattgttccggagccacagaaaggatcaacaaacgggcggtccggcgtccaattggttaattgcaccaaagcggcagcaagtgtttctttaatcggcgcaccgccctgatcgacacggtatcctcgtttgtgaaggcctgtccctgatgagtccagtgtaatcaaagcctgatctttcaataaagaaatttcgactttatactcggcacctgtttcttcaatccaatcattggctttgccggactgcagcttgagcttttcgacaattgcttttttgacgatccgctgacagtcgggaacgcttgcaagtgttgattttaccgattttccgataacagggaatttcccgttttcaggtataaatgagcgccagttaatcgctttcgttttttcaaacagttcatcaaatgttttcgctttaaaagaagcaacctgaacctttatacggtcggctgttctaagccaaaggttggcacggcagatggcaagtgcatcaccttcaaaaataactttcccgttatcaaccgtgcattcgtatcctaaatctcgtacttcctttgcgacaacagcttcaatgcccatcggcgccgttgcaattagtgtatacttcttcatcgtatcaccctgtcttttgaaacttttctcttttcaagataaaagctctccttatacgggagagcttgttttcatcattttaaatgtaagtggtctaacgttctgtaagccatgttttgttccgtcgtactgcaaacggctcatcacctcgtactcaggcggcaatcatctatctacagaaagcattctgtccttctctccgttgaattccgttaagaaggttcccctaccaaaatttgggtttctcgctcgaggggtttaccgcgttccactctcaccatttctagtgagacttcgtcactgtggcactttcaaggatactcagccatatccgaagacgtaggcttttttcctgccgtcagtctctaaagactgccctagcttatgacttcgctaggcacgaacactacgggcatctcagcaccgtgcgagcatggactttcctctacagattcaagatctgcagcgattacccgaacgttaagaacatgaattattatataacaactgtttacaatttacaagcgccatttttttcaagcgtgatcaatcataaagcttgctgccaaaaacgtgtttttctaagttagacagccgttttaaaatatcaaagtttgttgtgttagattgcacaggctgttttttgctggcttcttcaagctgttttttcagctgcagattttcctgctgcagttcttcaatttcttgatggaaggtttcataatccttaataatcatatctaaaaatttgtcaacgtcttcttgcttgtagcctctaacgcctgttttaaattctttttccaaaatttctttcgcagaaagctttactttatcagcaagcatctttttcacctcgtatcgtgaatcatcacatatattttttcagaaatctgtacggttgtcaaatttctctctcattgttagtagctgtcttcctccactgtcactctcaagtcatccattgtaataaagtagatgggatagccatcctgttcgcgccttttttccgctgtcccaagcatatacttaggggagccttccttttccgggtcatataaaagcagaagcccgtcggacttatcaatgaagaactgatttttttgtttgaattgaagcgggctttcataaggacggtgagtcaggcttgcttcatagtctgcctgagacagaactgcttcatactgttccttattcggttctttccagttcttttcctgctcgtaaaatggtgtgatgacagctacttttaagtcagggtattcctcctgcaaatcatatgcagcttctgccgcccacagctccgctccaagctggcccgaaattaaaatccattctaatccttcatccaaaaaagcaatcagccgattcttaatggctttttttatgtaatacagcgccttgtcatcctgcttaaatatcccgagttcaaacggtttatagcccgtaattgccagtactttcatcatttcacctgctttaaaaaatggggctcccgtgggccccatttgttgtgctgcattgtttacaccatcaagctgcacgttttccatactagtagtcgcagcaaggttttcctgcttgaaaatgctgatgcgtagccgggtcaacatttgagaaagtgtgtggaaagtagtgaacgtgctgaaaatgctggtggtttacgtttgttgtatgctgtgggtgaatgtgcggcacgatagtcttcgaaaacgtatggtgttcacagcaatgagtaggatggacaattggcgccatcatatgcggtctgcagtgatgcatgataaaatcccctttccataaactttattacaatactaagctatgaaaaataaggggtacatgttctgatgcaaagacctattttaaaagtgtgcaattaagctgtctttaaagtttgaaaacacaaaagcaatcaaaaataccacaacaaagaacaagtaaaaaacacccttatacataccaactctccctttaaaaataactaacgtcattttacaggattcgccgctattctacaacaaaatcaatgtgaattcagcaaaaaaaattcatggcgaaacaagtcgtcttttgcgctttcccggggaatatttaagaggaatatttcctcttcagccgggcaattctcacatgcagtttttcagtttctttctctgataagcatgccgcatcgctaagcaattgctctgctatttgcaatgcttttccggattcttttttcttatgctcaaaatatttcgcgagctctattacagcagcgtatctgcacttctggttttgcgagcgggacagcttttcccaaagcggcactgcttcttccaagcggttttgttttttgtacaggagcgataaatccagccgtgcactgtcctggtcctcaaacgatttttctataagcctttccaactgcttgatcgcttggtccgtttctttatgagccataaaccatttcgccatagcataggcttcactgtgttcttttggcgcatgtgattctgaaaggatttttttagacatatggatgtacaatgaaatgagtgataacacatccatttcattatgatgcaggacaccttttaaaagatccggctcttgcgccttgataaaatgaaagtaaagcattggcgccaagtagcccggtgtgtcttctagcctgcggatgccgagctcctctttttcaaccgtgccaagagatacacggtccattttgtgtttccacaggcgtctagctccatgcaaaagatcaaagtggccaaactccggaagcttcggaagtctgtcacggatcaaggtgtgccttgttttcacctgcggccaatcaaaggctttgccgttgtaggtcacaagtgatgtaatgtcaacctcgcttaaaaagctttggtacaaggcgacttcgttccccggtttgggcaaaagatgctgtttgactgtcactcggtcttcatatactctcgcatgcccaagcaaaaaaatggtattcccagctccacccccaagaccggttgtttctgtatcaaagaaaaagaggttgtttttgttatacccttttgctgacaatgtatgcgacaggccgctttgattccacagtgtgatcacttcttcaagctcagaaaagctgtataacccatggcggtgagaaagcggatattctacttctctgatgaggcaatattcatcttcgaagatgaaaggcttcatgccaaaagcctcccactcttctaaaaacgggatgtcatcaaagtggttttcttgtttgcctgcttctattttttgttctccttcgtcgagcgccatgtgctttttcatccgttggagtttcccttttaatgacatatccggcctccctccttacgacatttgatccaacagctgcaaaattctttcctttgcttttatcccttctatttccgtacctatacaagacggacagccgtcatgacaaggacaatgtgtaatcagttgtttcgccgcttcattaatgtctgaaaaacgtttaaagacttcctccgccaaaccgataccgcccggataatgatcatataaaaatatggttggcaatccggtatgggctgctttgatttgagaaacaacatgaacatcatttcgatcacacatgatatacacagggacaatatgctgcagcacattcgagatgccaagaagcagctgttccagtgtcttttccccgatgtcttcatccgctgttttgatttcgagccaagctgcacttgtatgcagttcttcttccggcaaatgaataggtccagacccaatattttcaaaagtggtcatttttatttttttaaaaatggtcggcagggcattgacagtgacgtctccgtagtgcaatgacgtacggcttttttctttcgttttatcgatttctaaaaccttcagctgaactgccaggtttgcatccgtataatattcgacatcgacttttctgacatacgcctttttatggtcccaatcgagcttctcaacttgatactgaacgccttcatgcaaataaatcgcttcatcatgcaaaagcgtcatcgcactaaaacggtccatttcaccgataatccttacatttgcaatatccgactgatcaactataacgacattttcctgggaggcggaacgcaaactgatgtttgaagcagggaacgactcacttgcccaatggtaccgttcgccgttgcggtgaagaacagcctcttcctcaagatactcaagaatatcactgacttccatgggtccaaattcttcatcagctctaaaaggaagctcataagccgcacactttaagtggtctactaaaataatcaaattctccggattgattcttgcagattcaggcgaacgattaaagaaatattcaggatgccgcacaatatattggtcaatcggtgttgaattggctaccatgataatcaaagattcaccgtgtcttctgccggctcgtcccgcctgctgccaagcacttgcaacacttccgggataccccgtcattacacacacttgcagctggccgatatcaacaccaagctctaaggcattcgtactgaccactcctaaaatgtcgccttctctcaggcctttttcgatttctcttcgctctttcggcagatagcctccccgatagcctctgattgattttgttccaatctcttttttcacaagctcctgaatatggcttaaaataatttccacccgaactctgcttctggcaaaaacaatggtctgcactttgtttttaaggaactctttcgccagttcattcacttctacggttgcgctccttctaatattcagcggtttgttcacaattggcggattgtaaaacacaaaatgcttgcgtccgctcggtgcgccgttgtcatcgaccagccgcatcggtttgcctgtcagctgctctcccaattcctttgggttggcaattgttgcggaagtacaaataaaaaccggatcacttccataaaaccggcagatccgctttagccgccggatcacatttgccacatggctgccgaacacacctcgatacgtatgaagctcatcgatgacgatatacttaaggttttcaaacaaactgacccatttcgtatgatgcggtagaatggcagaatgcagcatatcggggtttgtaatgacaatatgacctgcttttctcaccttttgtctgattgccggagacgtatccccgtcatatgtaaagcttttaatatcaatgcccatttcatcaataatttcatttagctcgctcttttggtcttgtgccagcgctttagtcggaaataaatataacgcccggtttgtttcatcttgggcgatggactgcaggactgggaggttgtagcataacgtttttcctgatgctgttggcgttacggtaacgatgctctctcctttttgcacatattgaaaagcggaatattggtgagtatatagttcatcaatgccccttttcgaaagggccgctttgattctctcgtctatactttcgggcataggccttgtttttgcttcccgaggctcaatttcatgccaattcacaacgttttcatttccttttaaatcagaaatgagttcagtcagtgatttctttttcattctttacacctctttgtcaagtacagtttaccgaatatttgtttgcatggctaggtgcaaattttatacagttgaataaaaaaagcaaggcatacgccctgcttatttcgctttgattgtaaggagctttgattcgcctttacgagcagccttttcgcctgccggcaccattgatcctacagcctcaccattcattataacgattgggatgactgtgctgctcgctttttcttttattaattccaaatcacatgtaatcagcgggtcaccgaccttcactttatccccttctttaatgtgggcagtaaatccttctccgttcatattgactgtctccagcccgacatgaattaacagctcaattcccgagcgagtccgaatgccaacggcgtgtttggtgtggaaaatctgaatgacttcaccttcagcgggagaaacgatttcaccgctagaaggttccacggctattccttctcccatcattttctgtgaaaaaacagggtccggcacatctgacaggtccattactgtaccgtctgccggagaataaataacctcttctgtcaccttttcctgagttttgcccattccgaataattttttcagcaatgtattttctcccttctcattcttcaaccgttatcccttcattcaccactatttaaccacactttcaattttgcttcaatttataacaacatctggcatagacgcataatctggttaaaaaaggcggtggcgaaattggaattctatgatgacaaaaagaacgaactgcaaaagaaagaagaaatcataacggaggcaatcgacactctttttcaatcctcagcgttcggcaaccttataaacggatttcagaacctaatcaactcgagtttaaaggatgtgcagacgaccatacatgtcagagaaagagatactgggctgtatatcgatattaccattccggcgacgtttcgagatggcgagatcgtcgttgatgttaaatcgaggtatctccatgtaacactccaagaaaaacagaaacaccaaaatgaggctacctttacaagcatgacaagaacggttcagctgccttatgaagttcgccaagaagatatggaaacgtcttggaacgagcagacaatgacacttttctttccaaaaaataagcatgaatgaacgattcattcatgcttctatcatttaaaaaagctggtaaatccctttattaaagatccgacctgattcattgcactcattacttgacctgtcgtatccatcattttattaaaatcaaattgcccatttgcttttttgaactgcgacataatgctttgaaattgcgaaggctgctgttgattaggccttgggataggataagggttagaaaatacaggcggctgcataggcataggctggatcggagcataaggctgataataatcctgctgtccataatgctgctgaggcagttgttgctctaaataaccgggtgcagcctgctgataatatccttgcatatgctgaggataataatagcccatttgccgaggatagcttcgagagctcccgttcattgcgattcccccctaaacacaacatatttctcttctatatatgtatgaatgacttctattgtttgtgtcacaagtgatgattagcatttgtcaaattgtgtcgaaagtttaaattttttaaaaacagaaaaaagtcgaatcattatggtaccatattttcaatacagatgagaggggatgcaccataatgaacgtatcatacttaagcaaacgttttgcagaaatgaagaaatatgaaacagactgtatgaataaactgatggactttgccaagttcctctatattcaaggacatctcagcataactgagtttcgtaacagtatgaaggttctcgaagcaaatggagcagaaagcccggcatatgagatgaattaacgtccggccccctataaaaacgaaaagaagacagccttttaccggctgtcttctcttgcaatttcatcctttactgcgtgcaatgtataaaggactgactcagtgatgtccttgaatcgttttttatgaatatgatgaacatatgattgaaggaccaattccaggaaattatcttttacggtctcaatttgctctttatgcacatattttggccggtgggcttttatcaattcaagagcaccctctgcccagcgggccgccagttcatcattctcttcaactgcaggctttatcatctcaaaaaaatcataagaatgattactgttttttccttcctgataccgatcagcgcctttttcagcaacttcaatcatttgctcggtcatttccagcaaagtttgtgatagcaatatctttcacctcaatgcctatcgtaccaaatttcactcgcaaattcagccgatgcggtataccttctcaaacgcatacctgtgttcaggcgattgatacagctcatttatacaaatatgaagatctatgatttcttcttccagcacactcaggcgatcattttccgtttcccgcatctcagcctctaatgcatttacagaatgattcaggctttgctcagctcgcgttaattcatcttctatatcagaaagcatacggagaatatctgtcttgcatacataaccggacattcgtgtacctccctttccttgtctctcccgcttaacattctttgctctcaaggctctttccttcctcatgacaaaactagaagcaaatcgccaaacaaacaggtattccacgaaaagctgaagttttcgacaaaaacacccgcaaaaattgtatgatcctcctccttaatgcaaacgatacttgtgaggaggtgccgtatgaaaacaagaccgaaaaaagccggccagcaaaaaaagactgaatcaaaggcaatcgattctttagataaaaaattaggcggcccgaaccgcccttctacgtaagaagcaaggaatttccttgcttctttattttttcagccactgctccaccgcaaaaagcgcatgaagctggcgctttttatgtaaataccagtctgtcaattcaatctgcttcggcaattcctcgcgcctaaagaacgttttctttatctttccatgaaaccaatctgttttcgttccgtctaatgagtggattaactcagggtagcatgtccttagcataggagatgttctttttgtaatcccgatcatcttttccatatcaaaacgggaacctgtgtgcggcactgtgtgcaaaaagtgataaaaagaggagaacaattctggcttgaacagcaattgagacagctgctttcccagccttatcctttcctccgcctttgaaaagcgtttcactgaaatgccgtaaaaaaacccatttgaggaaggaaaaataacggtgttaaaatgaaaccagtcacttaaataaaaaggaatcgtgtcaaaaacattctttttaaacgaaggattttgtataataggtgtttggatagtgttttgttcatttataatgagggcatacattagccgctccgtatttcgctcatgccaaaaacgggtccattcttccgacataaattgtgagacgccaaacacatgcagaagatgaaacagcggtttcccgactctttttgaccagtggtataaaagaagctgcggataggcatccgaaaaaataagccagttcgctctttcataggctaaaaagaaccatttttgctgtctctcacggagtccaagctgaaacagactgccttttaaatcagtcattgaccagcctgcattacgagaaacgaaagaagccaaaagcgaccatttgatttccggatgacggtcgtaaaatgctttataagcatttgttcttgaaatgttatccgcgttttttatttttgtctgccgctcaatccggctcagaagctttctgatgatctgttgttcttgcacgttcattcacttccgtcatgattagtttaataaggaggatgagaaagtgattcggtatcctaacggaaaaacatttcagccgaaacattcggtttcatcccaaaacagtcagaaaagggccccgtcttacagtaatcgcggaatgaccctcgaagatgacttaaacgaaacgaataagtattatctgacaaaccaaattgccgttatacacaaaaagccgacacctgttcaaattgtaaatgtccattatccaaaaagaagtgccgcagtgattaaagaagcttactttaaacaatcatcgacaacagactacaatgggatttacaaagggcggtatattgattttgaggcgaaagaaacgaaaaacaagacctctttccccctgcagaattttcatgaccatcaaatcgagcatatgaagcaggtaaaggctcaagacggtatttgttttgttattatatccgctttcgaccaggtttattttttggaagccgataagctgttttatttctgggacagaaaagaaaaaaacggcagaaaatcaattcgaaaagatgagttggaagaaacagcttatccgatttctcttggatacgcacccagaattgattatattagtattattgaacagctttatttttcgccatcatctggtgcgaaaggttgattaacgaaaggttgagatgttatgtcagatcaatttaacagccgtgaagctcgacgaaaagcgaacagcaaatcgagtccttcaccgaaaaaaggcaagaaacgaaaaaagggcggattgtttaaaaagacccttttcactttactcattctgtttgttttaggcgtagttggcggtgctgttatatttgccgtcatggtttctgatgcgccgtcccttgatgaaagcaaattgaagacgccttattcatcaacgatttatgataaaaatggaaaagagatcgccgaagtcggcgccgaaaaacggacctacgtctcgatagatgaaattcccgatgttgtaaaagaagcctttatcgcgacagaagacgctcgtttttatgagcaccacgggattgaccctgtccgtatcggcggtgcattagttgccaactttaaagacggcttcggggctgaaggcggaagtacgatcacccagcaggtcgtcaaaaactcccttctttcacatcagaagacgttgaaacggaaggtgcaggaagtatggctttcgattcagctggagcgcaattactctaaagatgaaattttagaaatgtatttaaaccggatttatttttctcctagagcatacggaatcggaaaagcggcggaagaatttttcggcgttacagatttaagcaaattgactgtcgaacaggctgcgacgcttgcaggaatgccgcaaagcccaacagcgtacaacccggtcaaaaacccggataaagcggaaaaacgacgcaacatcgtactcagtctgatgaaaaaacaaggatttatttctgattctcaatataacaaagcgaaaaaagtggcagtgaaagacgaaggcgtcgtgtcacagaaggaatatgaaaaagcaagtacaaacaaatacagcgcatttgttgaagaggttatgaaggaaattgatgaaaaatctgatgtcgatccatctgctgacggattaaagatctatacgacattagatacaaaagcacaagataaactagatgaattaatggacggagacaccgtcggatttactgaaggcatgcagggcggcgttacccttctcgatacgaaaaccggagaagtgcgggcgattggcgccggaagagattctacggttggtggctataattacgcgacccaagctaagcgacagcctggatctaccattaaacctattctcgactacggtccagttattgaaaataaaaaatggtcaacttacgagcaaattgatgactcagcttacacgtattcagatggaacacctattcgagactttgaccgttcctataaaggggtcatgtctatgcgtgaagccctcgcccaatcacgtaacattccggctctaaaagcattccaagcagtcggaaaagatgcagcagttgattttgctaatggactggggctcggattaaataaagaaaaagtgtatgaatcatattctatcggaggattcggagaaggtaatcccggtgtctctactctaactatggctggagcatacagtgcattcggaaataacggaacatataacgaaccgcattttgtgaaatcaatagaatttaatgacggcacgaagcttgacttaacacccaaatcaaaatcagcaatgagcgattatacagccttcatgattacagatatgctgaaaacagctgttaaaacaggtactggacagcttgcacaagttccgggagtggaagttgcaggtaaaacaggtacaacaaactttgatgaagcggatatgcaaaaatacaatatcgcacaaggcggtgtaccagattcttggtttgtaggatatacacctcaatataccgctgctgtttggacaggtgtagattctcaaaataagataggaaaaaaatctttaaataaaacagagcaacagattgcaaagcgcatcttcgcccagctcatcgccgatgtcgatgacggaagcggatcatttgagaaacctgacagcgtagtggaagcctctgtagaaaaaggctcaaaccctgcaaaactggcagggccaaatacgccaagcgataagaagctcacagagtactttgttaaaggcacagctccttctactgtttctaaaacatatgagaaagaagaaaaagaggaaacagctaaactgtctggtttaaacgtgaaatacgataaagacaatcaatctttaacgttaagctggaattacgacggagatgcgacctttgctgttaagcaatctgttgatggcggcagctactcagaaattcaaaacagctctgcaaaagaggcagtcatatcgggtgtgcagccaggatctgtgtacaaattcgaagtaacagccgtcagtgatgatggcaaaagtacagcttccacatcctatgaggtgccaaaagctgaagacgatgaagataaaaaagaccagcaacaaacggatgatgaaaaacaagatgatgagaagactcaggatgatacacaaactgatgattctcaaaaagatgacggtcagacggatcaagatcagacagatgattcaacaaacgatcaagacaaaaaacaagacaatacgaacaccaatccgtccgacaacaataaccaagaccaatcaaacgataacgataacgacaacagtaacaaccaggatacgtcggatggtgattcgaactctggtaagaatgattcaacaggttctgacacgaataaaaataaaacagacacatctaataaaacacaaacaaactcatcatccattgaaaaaacaaattaaacaaaaaagccgtcacctttggggtgatggcttttttggtacacaataaaaaacctcccgttttaacaggaggttttatcgattcatcgcatgatatttgtaaaaatgctttttcatttcggtaaacagctcatcaagctgaataaagcaatggtattgggtcggcttaagaagaataaattccactcgttcagcccaattaatcggctttgcgggatatgatttctccctcaattcttgccaatcgagcgatttcaccggctcacctgctgtccaatgtaacgaagccagcaaacacacaatgccctttaacatttcgttttggtcacatctcgattttcgtgtttgaaagactgggagaagtgatgctttgatgtcatcccacacttcaaataaaagcggaacgtatttcccgctgtcttcccatggcaaatcgccttgtaattccgtgcagaaatcaaaatacacgggattggtctgcaaggttttcttcatatccgaggaactcttctggccaagactgcgcaagtattgctcataagaagccaacacttcttttgcttgcgtcatcgtttcaccagtccttttttatccctcttctgcccttctctgcacaaagaaagcagcggacactccgcacagcgcggagattgggctttacagtgatatctgccgaagaaaataagccggtgatgcgtaacggaccagtcttctttgggaaccttgcgcatcagcgtcttttcaacttccagaaccgagtccttccaccggcaaatgcccaatcgtttgctgactctctccacatgggtatctacggcaatggccggcacaccaaacgcaacggataccactacgtttgcggtctttctcccgacccctggcagtttgacaagctcatcgcggtctctcggcacttctccgccgtaatcttcaataatcattttactcagcttttgaatatttttcgctttattacgatataaaccgattgatttaatatcctgctgaagctcttccagcggaacagccaaatagtcttccggccgtttatatttttggaataatgttttggtcactctgtttacaagtgcatctgtacattgcgcagataaagctacagccaccactaattcaaaaggattggaatgaaccagttcacactccgcatgaggaaacatgtcacctatcttgtctaaacagaattcaatttgttttagatttaacacgattgtcaccttttcactttattgttcaagccaattgtaaaaaggaacctgccttttatactctttttgcggttcattctgctttgcttgtacacgccggaatttttggctgtgtatttttgcctgctccacagttttaagcccgtttttcttccattcaaacaaaatccggtcaatgtagcggaaactgagttttcctgatagtacagcctcttttaacgcgtgtttgatcagttgtgcgtcatgctggtcctggtcctgccagatcgccagcgtttcacactccaaaggcgataacggccttgcgaactcttcctcaaaaatggtataaaggcttttttgttccccttctgcttttctttcctgtgtttgattctgtgcaagctgaatatactcgtacagcttgccccataaaggctgaagagaatatttctcaaatttgatgccgttttgatcctcgcattcttcaataaacagaaagcctttttgaataaacatccgcaatctgtttgtgcattcttcaacagaaattgacataccttcctgcagctgattcggtgtaggaaaatatgatcctttttctaaatgcattttaatttttaacagcagaataagttctgtttcattaagcccaagctgtttataatgcgtgagcagaagattggggatggttgatgttccctgctcctgcatatcaataaattgctgttttttcatcgtcacacctcttactgtaaaggattgtgattacccctttactgtaaaaagtctcccttgcaggagactcttttttgtttcatttgaatgtattacggatacagacggtttaacagtcttgggaacggaatcgtttcacgaacgtgaggcgctccgctgatccaagctactgtccgctctaatccaaggccgaagccggaatgaggaactgatccatattttctaagttcagcataccatttatatgcgtcagaatccagtccatgttctttaagacgcgattccaaaagttccatatcgtgaatccgttcagacccgccgatgatttctccatagccttccggcgcaatcaagtcagcgcaaagcacaacgtcctcacggtcagaagccggctgcatatagaacggttttaaggacgtcggatagcgagtgatgaataccggtttgtcataatgttcagcaatcgctgtttcatgaggcgctccgaaatcatctccccactcgatatcgtcaaagcctttttctttcagaaattcaatcgcttcatcatacgtaattcttgggaacggggctttgatttgctcaagttttgacgtgtctcttcccaatgtgtttaattcaattttacaattcttaagaactgattgcacgatgaaagaaacgtaattttcctgtacttgaaggttttcttcaaattctacaaacgccatttccggttcgatcatccagaattcgattaagtgacgctttgttttagacttttccgctctgaatgtcggtccgaaagagaatacttttcctaaagccattgccgcagcttccatgtagagctggccgctttgagacagatacgcatcttcatcaaagtactttgtcgcaaagagttctgttgtaccttcaggtgcgcttccagtcaaaatcggcggatccacttttacgaagccttcgttattaaagaattcgtaagtcgcgcgaatgatttcattacggattttcatgatcgcatgctggcgctttgaacgcagccataaatgtctgtgatccatcaaaaattccgttccgtgttcttttggtgtaattggataatcggtcgcttcgtgaatgacttcaatatctgtcacagcaagttcatatccaagcggagaacgctcgtcctctttgacaatcccttttatatagagcgacgtttcctgcgtcactgatttagctgtttggaaaatgctttcttccacttccgcttttactacgacaccctgaataaaaccggtaccgtcccgaagctgtaaaaacgcaattttcccgcttgaacgcttattagcgacccaagctccgatcgttacttcctcacctacgtgcttgtacacttggttgattgttgttttcaacatatttccctccaaaacaagaaagacattcggaagctcattgccccgcgaactcttttatcatcactttattatacccgctcttaactaaccgggtcaatgcagataaaaagcggcttttctgtcagccgctttttgatctgttagctatgtttttctacaaaacgcttgattctttcaatggctttttcaagaagatctaacgatgttgcataagaaagacggacattctcaggagagccaaatccggatcctggaacaatcgcaactttttcctcctcgagaagcgctttaacaaattcatctacatctttgaaaccgcaagattgagctgcctcttttgcatttgggaacaagtaaaaagcaccttccggcttcacacagctgaaccctgggatttctatgagctttgcatagatcgtatttaatctatgttcaaatgcttctctcatttcttccaatggctcagaaggcccgttataagcagcaatcgctccgtattgtgcgattgatgtcgggtttgacgtgctgtggcttgcaaggttcgtcatcgctttaataatgtcttcagagcctgccgcataaccgattctccagcctgtcatgctgtgggacttcgatacgccgtttataatgaccgtttgctctttcagtctgtctgacagctgtgcaatggaaacatgtttctttccgccgtatgtaagtttttcataaatttcatctgacacaatcaagatatcatgttcaaggcacacttcaccgagcgcagacagttcttcttccgtatacatgacaccagtcgggttgcttggagagttaataacgattgcttttgttttttccgtaattgcatttttcagctgctcaggcgaaattttgaagtgattttcctcaagcccttctacataaacaggctttccgccagcgagtttcacctgctccggatagcttacccagtaaggcgttggaataataacttcatcttcttcatccaaaatcacttggaaaagggtatacagagcatgtttggcaccagtgcagacaataatttgagacggtttgtattcaatattctggtcgcgtttaaatttctctgcaatgctgtttttcagttcagccaaaccaccggaaggcgtgtatttcgtatggccctcgttcatcgaacgcacagcggcatcaataatatgctgcggtgtattgaagtcaggttcgcctgctcctaagccgatgacatcatggcctgcggctttcagttctttcgctttcgctgtgattgccagtgtggttgatggtgttaatgcggatactcttcttgccagtttcaacttgaactccccctaattcgtcttaaggcgtgatatttttgagaatctttccagttgtaaagtccacataacttaaactgtattgcccttctttgtctaagtacgtcacttcccaaagcaggacgtttccttctcttgccagatgaacctctttttgctttgaaaccagcccttcatcctttatgattttcgccgctttgtcttcagagattccctctttcgcttcttttgagagaatttttgcttttttatcagcaggaacccagacatataatgcagtgccttttttatccgttccctttacaacataatatttttcttttccgacaaatgtttcgacttgatcaacattggcgagatcggtttcttttttagcttcagcagctgctgcttcgtgcccctcttccttttgtgccatggctgatttataaatgcttgccgagacaagaagtactgctaaaaaaataataccaaaaatgacggtaaatattaatgctttttttctcatcttctcacctacgtacgataaatggtaaaaacggcttggtttttgttttcttcatccagtgcaaggccgaacatcagattttctcttttcagtgtacgattcaatgtgtccacaattttatacagatcatcagaatgctctacattaattgttgaaagaatttcgattttactttccattttttcatcctccagtttgaacaaatattgtaagtcatactccatttcaggacacgccatactagtatcacagagcgggaaatccgcttttaaataaaacaccatcctactcccacaccgcaaaagccgctttatgcggcttttattctttttcccctgcaacataagcttcaagctcgctgtcagtcatttcggatactgaggttgtcggcaaggcatcaagaaacagccggccgtaaccagcggttttaatccgtctgtccaatataataatcgttcccttgtctcccgcagaacgcagcaagcgtccgattccttgcctgaaggtcagcacagcttccggtaatgacactgtttgaaacggattctttccttttttgcgggcaagctcacattttgcagcatgaagcgggtgatcaggggaccggaatgggagcctcacgatcattactgtcgtcagctcatcaccagggaaatcaacgccttcccaaaaatgatttgttccgagcaggatcgcctgattggatgttttaaaagtcttcatcagcttgccgggacttccgcctgtaatcccttgtgccaagagctgaatgccggaagcactcatgttatgcttaagctcctggtgaacctttttcagcatatcatgggatgtaaacagcacaagaattttaggctgtttttcctttgccatcagttcgatataacgggctgtatcctgtataaattcaggttgccctgtatcctgaattgatttcatttcctttggaatcatcacctgcatacgctcatcgtaagaaaagggtgactcaattctcattgtccgcgggaaaaagtcactcagtcccagtcgttcaatcataaattgaaaagaaccttcgactgtaagggttgcagatgtcagcaccacactatttttgcgcgcgaaaaactgatcagccagaagttcaccaggttcaagaggctgtgcgtaaatggccactgcatttttcgcaccctttgcatctatttcaatccaaaccgcttcatcatcatcagacccaaagaagagcttctgcaacgtctgacagtaatgctgcaagcctttcatgcttctttggtattcatcggctaaaaagacggttttgctcttcatacccttcaaatgtttttccatcagggatgactgcgcctcaaaaagctgctgcaaatttgtcagcatggaacaaagcctctccgcaccatccgttaagatcgaccagcttttatcctggctttctttgttcaccttaaacactagacggtttaagtcttctttaggttttcttcgtttgacaaaagaatgtacagagctgaagaaagcatcactttctgcttgaacgtgctgaagccactcttccaattcgaaaaatgaatcaaccggcaggctgtttcgctggaatagctgtctcatcttttttagaagtccctgctccttcagagtgccgattctgctcaatttcgtatgcaattctatgtacgtggctcttttccctaaatgttcgcttgccgcacgttcaaaatggtgtgcttcatcaataataaatgtcccgctttcgggaagcctttttttctggctgccttcatcggtcagcaaaagggaatgattggtgattaccaaatcggagcgcatagcaatctgtttggcccgctcgtaaaaaccgatcacatgctcactgcgacttcttttataggagtcatcgtcataagccaatctgtcccacagcaattttccgcctgaaggcaaattcagttccgctacatctcctgtatttgtctctgtcagccaaacaagaagctgtgcctttgtcagtacggcatcataattatcatcttcttcatgaagcacctgctcaaatttatacaggcataaataatgcgattgcccttttaaaatcgccgctgttaccggaaatggaaacagatcttggacaatcggcaaatcctttgtgagaatctgctgctgtaaaagcgtcgaatacgtgctgattatgaccggcttttttgatttcttggcaaaaagcgcagccggaataagatagccaatcgtttttccgatgcctggaggagcttcaatcagcgcatgctcacgattggcaaacgcatcagccacctctctcatcatcatcatttggccgtctcttttttcatacccaggcattaactctgacagcgctttttcatttcccgcttcccagctttcgatctcaaatgagaagttctcgtcctcatttatacgaacatcgatagcttcaggttctctgacagaaaacgaagaaaagcgcgtatagcccggtatctcggtatgtctgttttcattaatgaacatatccaacaaatgcgtcagatcactgatgaaatgctgcgaaagccttcttaactgctttaatgtcggataaggaagctgccgcagcttttcaaggatttccaaaaaaataagccctgtcacttcagcatcgctgtcagcccggtgcggctgatcatgccgcagctgaagctcctcgcttaattccgtcagcttatacccttcaaatcccggaaaaacaatgcgtgagagctcgacagtatcaagcacttcacaatctgggagctgaaagcccgccttatgtagctcatacttgacaaatccaaggtcaaaatggatattgtgggcgacaaaataagcgccgtcaagcaattggaatacttcttcagcaactgcttcaaatggctgttcattttctaccatttgattagagattccagtaagctgctcaataaaagcagggattgatttatttggattaatgtattttgaaaaccgctcagtaatttgtccattttcgattacaaccgctgcgatttgtatgattttatcgcctttcttcggcgaattccctgttgtctctacatctataacaacgaaccgttgcttattcattaaaatggacacctcaattcttgcatacgacaaaagtgtaacacgttttgtacggaaatggagcggcaaaaccgttttactctcaaaatcttaaaagaaaacccccgataaagggggcttttcttctacaaaattgtacgggcgggttcgtttcccagcatttgttcaattttgttttgatcattcagaacagccactttcggctcgtggcttgccgcttcttgatcagacatcattttgtaagaaataataatgaccttatctccttcctgcacaaggcgtgcggctgcaccgtttaagcatatgacaccgcttccccgtttaccaggaataatatacgtttcaagacgtgctccattattattattcacaatttgtactttttcattaggaagcattcccacagcatcaatgagatcttcatcaattgtaatgcttcccacatagttcaggtttgcttccgtaacagttgccctgtgaagtttgccgctcatcattgttcgatacatattatattctctccatttctcgaatatcaataatgatgttatctattaaacgcgcttttgaaaaagcaactgcaacagcgagaatcatctttccagcaatttcattcacaggctcgagttccggataggaataaagctctacatagtctatggttccgctagtcgtttcaatgatttcttttgcagcttttatcaccgcttcaggatctctttcaccggcttggatcagttccgcacttgtttgaagggcccgatacagcttaggcgcttcttttctttcctcagctgttaagtatacattgcgagagcttttggctaagccgtcttcctctctgaccgtatcgacaggaaccaattcaatatccatgaagaagtcactgattaacccatcaacaacagctacctgctgcgcatcttttaaaccgaaataggcacgagtcggcttgactagattgaaaagcttcgtcagtacgatcgcgaccccgtcaaaatgtccttctcttgagcgcccgcataacacgtctgtgcgtctttctacatgaatcgtgacattcttttcaccgggatacatatccttagtatctggcgtaaaaagaatatcaactccggcgttttctgcaagagctgcatcccgctcaatatcgcgcggatatgcttcaaaatcttcattagggccgaattgtgcaggattcacaaaaatactcataataacggcgtcgttttcttgtcttgctttgtctgctaaggttaaatgcccctcatgcagaaaccccatcgtcggaacaaatccgattgacttgccctctgaatggtattgttttatggcttctttcagctgtgtaatatcagtaatctgtctcatcttattttcccccgtacaagccgtcaagcactgtctggttcatttgaaaggaatgcttttgttcagggaaagcacgatgtcttacatcctgaacatatccgctgattgctgtttcgatggtttcatcaatgcgcgtatattgctttacaaatttaggtgttctctcaacaccgtggccgataatatcatgataaacgagaacttgtccgtctgctttcacaccagccccgattccaatgaccggtatgcttagcgtctcggcaattttggctgtgagttctgccggcacacattccagcacaagcatcatagctcctgcttcttcgcattttatactgtcttctattaattttttggcgctttgttcgtctttgccctgtactttatagccgcccagtacgccgactgactgcggtgtcaaacctaagtgactgactactggaatgcctccaagcgttaatgcgcgaatggattcaaacacgccttctccgccctcaagcttcagtgcgtcagctccgctttcctgaacgatagccgctgcatttttcagcgtatcttccttggacaggtgataagacataaacggcatatctgtcacaataaaggtattcggcgcaccccttttaacggcttttgtatgatggatcatgtccgcaactgtcacaccgacagttgaatcaaggccgaggacgaccattccgagtgaatcaccgactaaaatcatgtcaactcccgcttgttcagcaagtttagctgccggataatcataagcggtcagcatgacaatcggttcttcagactccttcatttttagaaaatccagttttgttttcatgttttctcctcctcatgtttagaggagatgatctgccgttttcttctgcaagccaaaaaaccttccgttacaacgagaaggattcttcactttctaaagttcggcgagtttcatccctctgtcccagtccttttttggatcaaggcagactgctgcaatgtctatctattttaacaataggtgcagttcgcaggcgatactgcccaatggaagtataccaaaatcaacgggcttgtaccaacacattagcccaattcgatatcggcagagtagatttttttaatgccttcgttcgtttctaaaagcagaacgccttcatcatctatacctaacgccttaccgtaaaaggttccgtttaacgttctggctctcatattagtgctaataccgagcgcatagctttcccataaaagcttaatcggcgtaaatccgtgcgtcatataatcccggtaccgtttctcaaagcatagtaaaatatgctggatgacgccggcccgatcaattttttccccagcagcttggcagaggcttgtcgcgatgtccttcaattcatctggaaaatcattaggctgctggttaacgttaatgccgatcccaatgatcactgaacgtacgcgatcttcttcagcctgcatttccgttaggatgccaactgttttttttccgttaatcaaaatatcatttggccatttaatatccgtttggatgcctgctgcctcttctattccctgcacaacagctactgcagcaagaagagtcagctgcggtgttttttggagcggaatgtcaggccgcaaaatcaggctcatccaaacgccgtttccttcttgagaatgccataccctagacatccggccccttccggctgtttgtttgtcagccaccacgagggtgccttccggtgcgttattattcgcgagctcatgagccgttttttgcgtgcttgaaagaacgtcatggtaaataagatgctggcccatcacttccgtttttaatccaaaacgaatttcgctttcactgagttttccgggttttttgatgagccgatatccttttcttctaacggcttctacttcataaccctctttccgaagctcttcaatatgcttccacacagcagttcttgaacagccgagagcatcactgattttttggccggaaataaattcattgccggcctgagaaaataattcaataaggtcttttcttaatgttgaccgcatgtcttcagccactcctctatgtgtttcttttgattggagagcttccctgtcacaacagcctgctcgatccgctgtaattcttccgacacccattttccagccggccggtttcgaagcgcaagcaagtccttacccgtgatatcaagatccttaaggcttttgatcggcaggttttgataagcgtactgaatgtccttcagtttcttttcatccagtttttcgttttgccgaagctgcgatactttggccgctgagagcagtgctttttccccagctctgtacattgtcattgcgtcaaggctctggccaaacgtatcggcaatgtgaatggcttccttaatcacttttcccgggagcttccaacctttcaggaaaaggggcgcgtctttcaagactatgccaaggttaattaaaagagcagcccaaagctcctcacgggatgttaaagagaagaatggaaactcactcgttgaaatcaggttttctcgtttatgataaaaaccaggaagctcttcatacaatctcgtttgaatgagtgtttgaagcgcctggcgagaagctcttccctgcagcaatttctcgaactctatagtttttcgttcgactgaaacatgggagaggagtgatttttctttcgcaatggcttcttctgtttccggtgaaagcgtaaagccaagctggctcataaagcgtacggctctcagcatacgaagcgcatcctcttgaaatctatcctcaggctttccaacggttcgaatcactttctgatcaatatctttcttgccgccaaaataatcaagcaccttcccgtccgctgtcatggccatcgcattgatcgttaaatctctgcgttttagatcctcttctaatgatgagataaattgcacttctgacggtcttctgaaatcaacataatcagattcagtccggaatgtcgtgacttcataggtttcatcctcccagagcacaataatggtcccgtgctctttgcctacatcaacagtccgctgaaacagccgttctacttgatcaggtgccgcatctgtcgcgatatcgacatctccgatcgttcgtttcatatagctgtcacgaactgcgcctccgacaaaataagcctgatggcctgcttcgattaagatgcggagcacgggaagtgctttgataaaaactttttccatgtgatcactccggttctgctaaatcggcataaatctgttcatactggctgacaatttttttagaagaaaattcattttcaagcatctctattgccgcctttgtaaaacgattgcttagctgttcatcttctaaaatgctcatcgcgcgggctgttgcggccgtaacatcaccgacatccaccaaaaatccgctcacattgttttttataacctcagggataccgccaatgtttgttccaatacaaggcactccgcaagccatcgcttcaagcaggacaaggccaaagctttctttttcagatagcagcagcttcaaatcgctaatagaataaagctcttcaacacggtcttgatttccaagcattaagacttggtcttccaagccatattttctgataagctcgcaggctgtcgatttctccggaccgtctccgactaaaagcagcttcgctttcgttttgccagcgatattgcggaacacacggatgacatcctgcacgcgtttaacttttctgaagttggacacatggatgacgactttttcatctggtaaaattccatgtttctctttaattgccgctgtgtttttcttcagatacacgcgctcgtctataaagttataaatcgtttcaatttttttctccggtttaattaaatcgtacgtttcagccgcaagcgctgaggagacggccgtcaccctgtctgatgactcaatagcaaaacggatcagatcttttagagacggatcataacctaacaccgtgatatccgtgccatgcaaagtggtaacaatgccgatattgcgtttcagcatttgttttgcaagataggcgcaaacggcatgcgggagagcatagtgagcatggataatgtctaaattctcccgttccgccacctcagcgattttgcttgccaatgtcaaatcatacggaggatacttaaaaacagcatattgattaacctcaacttcatgaaaatgaatattgggatgatatgtattcagtctaaacggaatgcttgatgtgatgaaatggatttcatgtcccttttcagcaagctgcttccccagttctgtcgcaatgatacctgagcctccaacgctcggatagcatgtgattcctatttttagttttctcattgttcgcccccaagcacatcatgatcaagcatcagcatccgtttggaaaagaaaccttcggcatactccacgcccgcttctttaccgtaaagcttttctctcgcttcaacgatttcaatatacccattcgtcagaggagtagaaacggaatcctttgacgggataaactggcttttgtaggcgttgaggctttgtttctttgcctctattgtatccgagatatcaataacaaaatccggctgatgaaaaccatttatcatataatagtaaaccttgctgactttatgcgccggaaggcttttttcgtctttatatttatggattccggcggaaaagatcgcttcttccaccagtgcagccgcattggcgtgatccggatggcgatcctttttatacggcataaaaaccgcttttggccgacagattctgatgacagtgacaattgaccgaattgcctgatcactcattattaggccgcggtctggaagcgttagctgaattcttttatctgcgcctaatatgcgggctgcttcagctgcttcttctttacgcaaactgaccgtaccgttagaagagagttccgcttctgtcaaatcgcatatcattacttttttttcctgtttgacaaacttcgctattgtgccgcccattccgatctcgacatcatcactgtgggcgccaaaagcaagaacgtcagcattatacattcggctcttctccccgaagaaggtcacggaattcgaaaacaccttcatcaagtgtgcgcacaagaatttccgcagtacccatatttgtggcgagcggaatggaatacacatcacataaacggattaatgccgagacatccggttcatgcggctgcgcggtcagcgggtcgcgcaaaaaaatgacaagatcgagtgcattggcagcgatcagtgcaccgatttgctggtctccccctaaagggccggattgaaaacgttcaatttgaagacctgtcgcctcatgaattttcaaccctgtggttccggttgcgtatagatcatgattctttaaaatatcccgataggcagtcgtaaattgaaccatatcctgttttttcttgtcatgcgcgatcaaagcaattttcattgtttatccccccgtctaatcaatgatattttctaaaccatacacaagctgatcaatcttcatgacttgttcgactgacagtttaacgcctgacatgaaagaagcacggttataagaatcatggcgtatctgaagcgtttggccatccatgccgaacatgacctcctgatgcgcgatcagtcccggaagacggacgctgtgcaagcgaataccgttttgctccgctcctcttgctcctgggagaatttctttttcatccggatgtccttgctgcttttctttacggacttctgaaatcatttccgctgttttaagcgcagttccgcttggtgcgtcaagcttctggtcatgatgaagctcaataatctcaacatcctcaaaatagttggcagccatttttgaaaatttcatcatcagtatcgcaccgagcgcaaaatttggcgcgatgatggctccgatccctttttcttctgttaaagatgtgagctcttttaaatcagcttctgagaaaccggttgttccgacaactggacggactccgtgctctaatgcaatttttgtatgtacttttccgatttcgggcgttgttaaatcaatcaagacatccggttgtgtttctgtaaaacaggcatggatatctgtataaatgaaagcatctgactcaacaggcatcacatcagataatttttgctgatcgtatgtatggtctatggccccgacaaggtcaaaatgaggtgttcgttctgccaatttaacagcttcctgccccattcttccacgcggtcccgcaatgactactttaattgtttcgtttgacatctcgatctcctctactttccttcttcttttctggtccagcgatctttatctcttgtattaaatttatgcatgactcggtcgtgggcttcctctaaagagatatcaagggagttggctaaacaaaccaatacaaatagcacatcgcccatttcctcttccatgcttttatcatcttcagtcgctttttttggtttttctccataacggtgattcacttctctggcaagctcgcccagttcttcagtcagcctcgccatcatggccagcgggctgaaatatccttctttaaattggccgatgtaacagtctacttcagcctgtatgtctttcattgttttatcactcactgaacgaaacctcctatcatcctcttacatgttagctaattcagatacgtttgacaaatgtttaagcacgtttgctgttttctttttcatccactataatataaacgctatctaatggaaggaaaaggggttttatgtgatgcttggagaaattagattaaaaaacatattttttattttaatcggagcggcaattttttcatttggcttggttcatttcaatatgcagaacaatctggctgagggcggttttacaggtattacacttttgctttatgcccttttccacatcagcccctctatatcgaacctggtgttgaacattccgattttttttattggctggcgtttgctcggcaggacaatgtttgtttatacccttgtcggcactgtagccttgtctttgttcctcagcatctttcagcgatatgaaatccatatgccccttcagcacgacttagcgctcgccgctttatttgccggcgtattcatcggagccggcctgggaattatttttaagttcggcggtacgacaggcggtgttgatatcatcgcacgtttagtgaataagtattttgggatcccgatgggcagaacgatgtttgctttcgatgcctgcgtcatcattttgtctttgcttacttatctctcctataaagaagcgatgtatacgctggtagctgtatttgtagcggcaagattaatcgattttattcaggaaggcggatacgctgctaaaggcgctacgatcatctcttcgaaaaacgacctgattcagaaaaagattcttgaagaaatggaacggggcgtcaccattttgaaaggacaaggctcctacacaaaagaggatatagatgtactttattgtgtggtgccgaaaaacgaattggtgatgctgaaaagcgtgattaactccattgatccccatgcctttgtagcggtaagcgatgttcacgatgtgctcggagaaggatttacgcttgatgaaaataaaaatccgcttccgcgctgacatgtaatagaaaaaaggcggctgaccgccgcccctcacccttatttagggtagtccctttttttcagcttgtttttttccgccttgtactttctgtaaccgacataggtaagagcagtaatgatgatactgccggttgtaatcatcacccagagtaaagacggatcggcatcatcctcctccaccctgtcaaacacatttttcaggtcatgctgaagaagggaaagccgttcaagcttcgtgctctctgtcatttgctgaaattcctcttgctcaataacatctatatgttttccgactgtttcaagctgatcctctgatacatcgattgtaagactggggtaaatcaagtcatataaactgataaattcattccatttttcatgaaagcttatgcttccattcttctggacatctcgcttcagctcagtaaaagcttccataatcggtttttccagtgagccccaaagcgggtcagaccgattgtcaaccgcatccatcagcattctgaactgcgcggctgctctgagtttttgtgtgtctgatgtatcagcttgctttaaactccgaaccatatcattatagcccaatgtgatttgacgaatttgggctcccgttagcatggggtcttgctgttttttctcagcggattttaatgttttttcaaaatactccaagacttgaagcgcctcttcatatttcgcctgtcgggtcatttgaaagactgtatcggataaatcattcaattcctcgaggcttccccgctctgcagccttggcatttccattataaaaaataagtgcaatcaacaaacagatcgtcagctttcgtttcatgcaggtccctcccactctctctccttacagaatatgaagaaagggacaaggatagaccaacattgtctttacatcagctcaagcttcgtttgtttttttgagaccacaagaaagtaagcaagcgcgattgaaaagatgcttagccaaaatgttccgtatcctatttcagtcatataatcagaaagcatagagtattgcggcatcatatcaaacaagtagtcaatgacatcgttatgcagtgtccagactgcagcaattgcaagatgccaaaatgaaaaacgaaaatacggactgtataatacgccttgaactgccattgcaaaatgcgaagcaattagcatgtagccctcccacggcaagtcaccagttactgcaagcacaagaaaattcatagccaccgcccataggccatactttacgagggtaactagcgcaagcgcctcaaagaacggagcattccgtttcatgagaaaggcaagcagcacaaacagaaagaaaaacgttgctgtcggactgtccggaacaaaaatcaggaaacgtgccggtgtctccaaaagctgcggcaagtaccaatagtagccgtaaaccgttcccagaaaattaatggctaagacaagaataagcatcggccgctgccctaatacatattgaaaccatttcacatcgaatcaactctcagtctgtaaaaataatatgtccaaataaaaaagctgacgccgggtcagcttttgataataaaagtatatccttccatttgacaattcacaatacgttattttgcggttgtttcagaaataaattttgcaagttcttcgagctgcttatcatttcctttgaacacacccgccggcattttgcctttcccttctacagcgatttttttgatttcatccggtttcagcccgctgtcaaccaatgaaggcccggccgctcctccctgaaggttatccccatggcaagaaatacagccctgttccttaaaaaccttatatccttctgcattggtgtcaatgtcggcttcttttgtaattttcccctgttcttctgccttggcccagtcatgagtagcaactgactgccacgtcaaaaatacagcagcggaaatggccagaagcatcataccgacagcgaccggacgcttccacggccttctttctgtccctctgtctaggaatggagccaaaagcagggccccaaaagcgagacctggcataatcatggcgccgaccactgtaaagcttccggcggcgtattcatacttcaacagctggtataagaaaagaaaataccaatccggcagcggaatatacccagtatcagtcgggtccgccatccgctccaaaggcggctgatgcacaatcgtcaaaacgagaaaaccgatgagaaagacagctccaaccatccattcctttaacaagaaatttggccagaaagcctctgttttacccggatactccgaataatccttcggtatattcggctttttttcagccggtatccttgagtcgcctacaaatttcatccctttgccccggtgcatgtcatcccctcccttttattcgcagatcaagagtttaaagcggtcctgaaatcccctgcttccggatcataataaaatgtgcagccatcagcccgaacaatgcggcaggaagaaaaaatacatggatcgcaaaaaacctagtcagcgtttgggcgcctacaatatccggatgccctgcaaggagcgttttaacttgcgttccgatcaaaggcgtagcttcggcgatctgcagcccgacttttgttgcaaacagagccttcatatcccaaggaagcaagtagcctgtaaagccaagaccgagcataacaaaaaagatcagcacaccgacaatccagttcagctcgcgcggttttttatacgcgccttggaaaaagaccctcagcgtatgtaaaaacatcatcacaatgaccaggctcgcaccccagtggtgcatccccctgacaatctggccgaatgccacttcattttgcaaataatataccgattcccaggcatttttgatatcaggcacataatacatcgttaaaaacattccagataatacttggataacggttacaaaaaacgtcagtcccccaaagcaatacacaaacgcagagaaatgatgggcgggattcacatgttccggtacttcgtgatcggcaatatccctccacatcggtgtaatatcaagccgctcgtctacccagtcataaattttgttcagcatgtcacccttcccccttaggctttgcttttccaagatacaggaagccgtcttttacttcttgctcataatgatcaagaggcgcaagcggcggcgtgccagggacattggtgccgtccttttcatagagtccgtaatggcatggacaaaagaatttattcgggtttttaggatcactattccagttcaccgtacaccctaaatgtttacaaattggcgaaagtgctacaatttcatccccgtttttgaagacccaggctgatcttgactcttctgactcataccaggcatcgacttgattaattttaaaatcaaagcgctgcggctcttttgtcaactcatcaacgctgacaacctgaaccatatcctgcttccctgtcgattttaataccgggtcgagtgcgaagcgaaccataggcatgagcatactagccgccataaaacctcctacacctgtgagcgtgtaattcaaaaattgacgtctggatatatcatgttttccgcccatctcttctcccccctctaggtcacccctgcaaactgactaaaatagaaaatattgcaataactctagacaccctcataatatatgaatctctcagcaaggtcaatatagccaaaatattgtttataaggaaatgtaagtgtttttatgaagtgctccataactgtaacaaaacgttcaaaatttcagcagtgcgttcatccaatatttttcttattaaagagtcatttaaatgctctaatggaacagacggtgtaacaatgattttgcctaacgcatcctcagctctccaactttcgtcagatgtgagcaggacaacatgcggaaattccgttatcagctcttcccgcaaatccttaagcccttgaacggttatttcatttctatcaacatatgtataaggcggaagtaaatatacccgtccctttaactgcctttcaagttcttctgagagaagctgcgtaaactcgcctttctccgccgccattttaaaatggttattaacccttatgttaattaatggtatgacagcggtatcaatgtaatccttagcttgtaaatagtccttggcatcagtgattctccacctcatcgttctccccctttacggcaacaagccttgcaattcactgcaaggctggtcatattatgtgagctgatttaattggcgcgataattgttcaaatgcctctttatcatgacgatctaacgcctcgtcaatgtcttttaataatttttctctttggaatgtggaaatagcgtgctctaaaatctgttccgccaatccctgatcttttttattctcaaaaaggtttttcggaatatgcgggttggactccagcaccgccgcatattcaggtgagctgtaagccgaacggaaattaagctggataaacaaatcctgctgtttatttaatctaatatcatgaaaagatttttccgcgtcggtagtcatgacattctctttatagaaccggaacggaacttcttcaacacaatgtgttgacattataatgcctctcgggcaaaattcagcctgctccacaaaatgaaccttctccatgagagaatcatggctcattaagtagttcaagatccaaacgcactctcggcgctttaactgataatggtttaaaaaccaacggataaaatcttttttctcattgacagaaacaggggtctgcatgtaattccctcctctatcgttcgtataatctatatacttatatgttccacatgaatggttaatattcctgcttatctagaaaattcatcctcgattcgcaaaatcgtttcttcaagctcttcattggctccgtccatttcaagaacctttttcaaaagcggcagcgcttctttttgaagaccttcttctaataggaagcttgcgtattcatataagaaatctctatcctcccggtaatgaagataggcagcctcaaaggattgttttgcttcctcgtattgctctaattcagtatatgcgcttgcaagataccaattgtatttaggatcttcttcaccgtagcttcgaacctcttgaataagatcaatgatctgatcataatcctcttctttgtgatacacggcaagaagtgtatgaagcgcctcgacaaagcccggatcaagcgcaagcgcctcctgaagcagcttcttcccctcttctgacttcccgattttcaaggccattttggcggcataaaggaaaagttctttgttatattcatcatatctgatcccctcttttgccgtttttaatgcctcttcatacattccttcagcttcatagcttttcgagagcggcatataaagtgaagtataagatggatcaagctcctttaaatcagacagctgcttaatagctgttttcacaagccccgcctgtaaggctgtaaaaccatagccgaaaatcgtattaggatcaggattctcatcgacagctttctcataccatggaatggcatcctcaaattcacctgaggcacttaacgattctgccagtctttgatggacattaacgcccccgatctcactctgctcctcagccgttgttttaaaatattgaaccgcttttgcataggctccctgagcaaagtaaagttctcccagtgcaaaatcaataacaggttcattgtccagaatggactttgcctggaaaagcttttgttcactgacttcgaataacccctgcatctgataaagatccgccataagcagcaaactttccggatatgatggatctgtttccggaatagtctccagcacagcgagggctttttcttcttcgtcaatatctattaaaagttcagcgtagaaattcgtcagttctgtttcatttggatataaatcatgtagatcactaatcagtgaaatggctttttctacatcgccccactcgtaataaagctgggctgcaatggctttatcttcatcatgcagctgtttttcagccttcgagagcgtgttgaggcctttttctgtttcacctgcttcaactaattttatggcttcttgaatcaatgtattcaaatcggaccggtcctttcttttcctatacaacatcaaccatacaaaaaagctttatttgttcgggttaatcttatcataattcagacgaatgcccccggcaaataagatgcttctgtacggaagggaattattgagtcttattagtttaccaaaagatcttgagatagaaaatgaaaaaaggaagatcgccctctgtacagtaaagcagctctttgacctgccggcttgtaagtaaagcacatcccccttttcgtttttctatcccctctataagacaagctatgttttttcgcctcgaattatgatctgcataaaaaatcctgaagtaaaacttcaggattttttcgaaagcttatttaaatgctcgaagaaggttggataagaaacgtgaatggcatccgtgtgctcgatttcaatcggctcctccgttatacaggaagcaataccaagcatcattccgattcgatgatctccgtggctggacactgccgcgccgcctttcaacgtttgtttgccataaaccttcattccatctgctgtcggttcaatttcagcacccagcttgcgaagctcagaaacaacagtatcaatacggtttgtttctttcacttttagctctgccgcgtccttgataacggtagttccttcagcctgagtcgcaagaagcgcgatgatagggatctcatcaattaaacgcggaatgatatctcctccgatttcaactgcctttagagatgacgtttctataatcaaatctccataaggctctgcaccgctatcagcagatggtttgatttcaagttttgcccccatgttttgaaggacatcaataatacctgtccgagtcggatttaaacctacgtttttcaatacaattctgctgtttggaaccatcgcgccagcagcaaggaaaaacgcggctgaagaaatgtctccaggaacaaaaatatcagcagctgtcagtttctggccaccagcaatggaaacactcgtttgatcttcagaaagcttaacgccaaaagcagaaagcatccgctcagtgtggtcccgagatttatggggctctgttacagttgttgtgccctcagcctgtaatccggccagcaaaacagcagatttaatttgcgcgcttgcaacaggtgatacataatcaattccttttaatgaagcgccgctcactgacagcggtgtaaactctccgccggctctgccgtcgattttagcccccatttttttcaaaggctcagtcacacgcttcattgggcgcttcgcaatgctctcatctccggctaccgcgctgtaaaaaggacggcccgccaatattccgagcatcaggcgaatggttgtacctgaatttccgacatctaaaaggctttctggctctttcagggcatcgattccttttccgtgaatcacgacatcgctgctgctttgctcaatgtgaacacccatttttctaaagcaatcgatcgtgctcagacaatctgctcccggcagaaagtttttaactgttgttgtgcctgccgctagcgcgccaaacataacagagcggtgagaaatggatttatcaccgggaatatgtatttctccatgtaaggtctgcaccttttctcgtttcattttttccacctcaatcagcataaaaagtttcatattccgcccgggcttcaatgcattgttctgcccttttgcggtcgtcatcagactgaaaactgatccttaaaatcccgttaatatcctctcgtgtttcgataatgcggatattcgtgatactgatgcgctccgcagctaagatcgctgttatctcggatattacacccggatgatcgggtacatccacatataaatcataaaatgcaggtatcgctcccttctgccgaagcggcagcccgtcgcgataatccttggcggttttaaaataacgaaatagattttccgcatcttcttgttctacatatgtacggatcttgtcaatttcacgaatccactcatcaaaacggtctaagattttatctttattatgtaataaaatatcccgccacattgccgggctgcttgatgcaatccttgtaatatctctgaatccgccggcagcaaaacgcttaacaagcggatacaggttttccgaatgatgggtttggtgaacaagactagctgctacaatatgcggaaaatgactgattacacttgtaacgccatcatgctcctccggcgacatttccacaaaatgggcattcgtacccttcagcagattttttaactgttccacagcttgtttgtctgttttctggcctggggttaaaatataaaatgcattttcaaacaggaactccttcgcagcggccactcctgatttatgtgaacccgccatcggatgccctccgacaaattgatagcggctaggcagcacttgatcagcgtaatcaaccactttttgctttgtgcttcctacatccgtaatcaaaagctcatgttcaattcctgaatgagccagcgcttcaagcataaccagtgtttgttcaacaggtgtcgcaatgattactgtagctgcctctttcgcaccgctaataaacgaatcagcacgatcgtctatcacgcctaattttaatgccgctaccgcctgttcatcagagatatcgattccgataatccgtttgccgggatgattttttttgatggctagggctatcgaaccgcctatcaatccgagaccggcgagcaatattgtatctttcatttgattcatacgtcatcacctggtttatagactaaagaggtgatattcgatcacctcttataaaatttcagctaaaatggcaagtatttcttcattttgctcttttgttccgatcgtaatccggagtgatgtcgggaaacctaatgcatttcctgaccggacgatatagcctttttccagcagagcctgaaacagttcatcagcaggacgtttaaagtcaattaacacaaaatttgtctgtgaagggtagcactttaaaccatgagttttcgcaaaatcataatactgctgaaggcctgcattattttgctcgacacaggaagcaataaacacttgatcatcaagtgcggcaatcgccgcagcctggcccagacggctcgtattaaacggctctctcgccggctcaatctggcgaatcaggttctcgtcagcaattccgtatccgactctgagcgctgccagaccgtatgcctttgaaaatgtgcgcaaaatcatcaaattggaatacttgcttaagagcggcacggtttccgggtaatcctctgctgttacatattcataatatgcttcgtcaagaacaacaaggacacgtgaaggaacgcgctccagaaatgcgagtaattctccttcagatgtataagtgccagtcggattattcgggctgcatatccaaacgacttgtgtctgttcgtcgatggcttctaacatggcgtctaaatcatgtgagccgtcgggacgaagtgcaatttcacgcacttcagcaccttcaataaccgcattatgtttatattgcggaaaagtcggggcagcagtgatcgtattggttttattgtttagaaatgcccggcagatgatctgaatgatttcatcagaaccgttgccgaaaataagtgatgtttcgctgacattgaggtgcttactgagccttgtccgcaaagcggcgctatacccgtccgggtaaagggctagctgttgaatctcatgatgaagcgcctcttttgcagcctctgaacagccgtaaggattctcgtttgaagcaagcttcacaactttatccaagccatattctgatttcactgcttcaatcggctttccaggctgataaggcttcagctgttttaaatgttctttgatacgcaaatcagtcacctcattttaaactgtacaagccgctaaacgccattgcataatcctcaaactcctgcagcgcctgatttctcgtttcagcgctgatgagccggtcctttaattcttctatttttctgacgagcgcacttcccactacgacaccgtcactaatttcattcatctttatgacctgttcacggtttgatataccgaaccctacagcgaccggaacagtgctgagattcttcactgtccgaatgaacgggtacacggatgaattgaactcattgcggacaccggtcacacccagagaagacacacagtagacgaagccctcggcttgttcaataatggttttcaaacggctttcgcttgtcggcgcaaccaaagaaatatacgtcacctcatggcttttacattcctcttgaaggctgttgctttcttctagtggcagatccggaacaagcagaccgtcaatatgattttcccgcagtaaagcgaaaaagtattctttgttcaattgtaacacaggattataatacgtaaagaggataatcggaatattcactccgttttttttcatttctccgcctaattcgattgcctttacgatattcattccttgatcaagtgcccgctttgaagcccgctggatcaccggaccgtctgcaagcgggtcagagtatgcaacaccaagctccaatgctgtggcgcctgctttttggagtgacttcgccagttcaatcgaaacctcaggaactggatcgcccaccgtaataaacgggataaacaatttttctgatggttgaagatcaaatttaaacatgggctttcacctcttcttccaatacattcattaatgtgttgacatccttgtctccccggcctgataaacagacgagaatgagttgaccgcgatccattcctttggcgagtttgaatgctttcgctaacgcatgggcagattcgattgccggcaaaatcccctctttttctgacaaaagctttaatgcatccaccgcttcttcatcagtgatactgtcataagtgacacggccgcttttatgcaagtatgcatgctccggaccgattccaggatagtcgagaccggctgaaatagagtagggctcaataatttgcccgaactcatcctgaatgagataagtcaatgaaccatgaataacccctacggttcctttcgaaatagtggcggcatgaagaggcgtatcaattccttttcctgctgcttcagcgccgatcagttcaacatcttcatttaaaaatgcctgaaacatacccatcgcattgcttcctccgcctacacatgccactactttatcaggcagagtgccttcaatacgtttcaactgatccttcgcttcctctccgatcattttttgaaattcacggaccacttgcggataaggatgcgggccgacaactgatccaatcatataaaagtgatcctcacaatgctgaacccagtaccggatcgcctcatttgtggcatccttcaatgttccgtttccgcttgttacaggcactacctccgctccaagaagcttcatgcggaaaacgttcagagactggcgggcaacatcctcttcacccataaacacagtacaggaaaagccgaatttggctgcaactgttgcagcggcaacaccatgctggccggcaccggtttcagcaatgattttcgttttgcccatttttttagcaagcagcgcttgacctagcgcattattgattttatgagaacctgtatggtttaaatcttctcgtttcaaatagattttcgcgccgcctaagtattcagtgactcgatcagcgtatgttaatgcagtcggccgtccggaatagtcctttaacagcttataatactcttcacgaaaagcggggtcatccttgatttgtttaaatgctgtttctatttcatctaacggctgcatgagtgtttccggaacaaactttcctccaaaatcaccgtatctgcctatttcattcggatatggatacatatcggttcatcctttcttctaaaagcctcatcagattctgatctttttgtccgtttttttcaattccgctggcaaggtcaattccttctggctgccatttcaataggctggtgatgctatccggattcacgccgccagcgataaagcagcgtttaccaatagccgcctgctgatattccggcacacattcccaagaaaatgcaacaccagttccgcctctagacccttttacagatgaatcaatcacaaagccgtcaacattatctttaaagcgggctatttcttgagttgtgttaccttgatggtgaagcgccttccatatttcacagcctgtcagcttgcgaagagcagcagcatccgccggtttttcatcaccgtgaagctgaatgacgtcgagcttcaagctcttggcaatacgtgacatcgtctctattgattcattaacaaaaacacctgcaacctgtttttcgacacgagcttggttcagccattttttcacatcttgcggagatacttttcgtttgctttcagcaaaaataaatcctaggtaatcagcctgtgattccgccgcaagctgcaaatcctttagtgaccgaataccgcaatattttaatgccggtttcttcacaacctcactccccaaacaaagcatggattgctttacgctgagaagtttgtctcatcaatgattcaccaataagtacagctcgcgccccatgttcattgacaaatgttaaatgttctaaagaaccgattccgctttcgctgacaagcaaggattctttcggaacgagagatgcgatttgttctgtctgctttacagatgtttcaaacgtttttaggtttcgattatttacgccgagaatgtcgggtgtgaacactttcaatatttgttctagcgttgatgcatcatgaacctccactaacacgtccatccccttttcacctgcttcaagatataattcatgaaggtgtaagggatcaagcacctcgccgattaacaatatggcatccgctccgattcttcttgattcctctacttgaagagaatcaataataaaatcttttctaagtacaggaatcgaaacagcacgctttacgtctgataaatagctgttttccccttgaaaaaacggggtgtctgttaaaacggaaatcgcatctgccttcgcagcctcatagtcttttgcaatctgcacaggcacaaaattctctttaataagcccttttgacggcgatgctttcttcacttcggcaatcaacccgataaaccgattcgggcttgccagcgcctccttaaatgaacgtttctcgaaaggctgctctaccggcaaaaccagtgttttcacttcttctttcttttgtttgatgattttttcaagcatagatctcttcctctttctgctttagtcgttcaagctgcgcggcagcgcctccgcttgtaatcgtctctaacgccagctccgttccttccttcagtgaggcggtaatccccgccgtgtaaatcgcagctcccgcattaaaagccgtaatagataaagcggaactgctgcttttattttcaaaaatattctgaatgagataggcgctctctttcggtgactgcacctgtaaatcttcaagtctgccatttgtgaaaccgaaatcttcgggtgaaacggtatattcccggcgctctccgtcctttaattcaatcacgtcggtcggtgctgtaattgaaagctcatctaaaccgtcacggcttgatacaaacatgacgtgcttcggctgaaacgtctccagtgcgcttgccatcagtccagctttttcaacagaatagaccccaatcacctgacgcttcgcctgtaaaggattgctgagcggcccaagcagattaaataccgttctgaaacctagctcttttctagtacctgctacatgtttcatagacgaatggtaaagcggcgcaaaaagaaatcccatgttgtttgtttcaatgctgcttttgaccttctcgggagtggtttgaatagaaacctctagctcctctaaaacatcagcgcttccgcttttagaagagacagagcgattgccatgcttagcgattttcgcgccagctgccgaggcaacaattgccgaggcagttgagatattaaaagtggaaataccgtctccccctgttccgcatgtatcaacaatatcaggaagtccatcgactgtaagagcgtgtgcccgcattgccttcacaaaacccgcaagctcttctggcgtctccccccgatgagcaagaatagacaatataccacccatttccgaaggagtcatttccgctgccatcatcatattcatcaacgtttcagcctcaccggcagtaaggttttttccgtcaacgcacaattgaagaaatttgttcatcagctttatcctccttgctatgaaacatgtcttctgcaatatgaatcgttttcagcagcgcaccggctttattacagctttcttcgtattcggcttctggaacagaatcagcaacaatgccagcacctgcctgtatcgatgcaacgccgttctttacactcatcgtgcgaatcgtaatacaagagtcgatattcccgtcaaacccaatgtaggcaatacaccctccgtatgtctctctcggtgttggctcgagctcttgcaaaagctgcatggcacggattttgggtgcgcctgttaaagtccccgccgggaaagcagacatcagtgcatcgacaggatgaaccccttttttcaatcggcctgtaaccaccgagataatgtgcatgacatgtgaaaaggagacaatttttgtgaactccggcacagaaacagaaccatactctgctactctgccgatatcgtttcgggcaagatcaacgagcatgtaatgctccgccttttctttttcatccttcatcagctcaaccttcagtctctcatcttcagctttgtctgcgccgcgttttctcgtaccggcaatcggatggatttctaagtgcccgtcttgaacgtgtattaaccgttccggagagctgccgactatttctctgtctagcagtttcatataatacatatacggcgaaggattgacgatcctaagcactcggtataactcaaaagcatctgcttttatcggcacctcaaatttttgtgataaaacaccctggaagatatctcctgcttttatatagcttttgattttttctacatcagccataaaagccgatttttcataattagaagataccgtctcaaagctgggtgtcttgtatgaatcagcagagagaaacagctcttttatttttttttggtccatcattttttcgatgagattttggagctccaaatgattttgatggaatacatccattttttcgttttctgtttcctctccagtgagccttgcatattggataaagtggacgtttttggtttcatgatcatacgcaattaatgtccggcaaacaaacagcatgcacttttccatgtctgtttcttttgtatgcgaaggaacagaaggctcaatcagcgggatcatatcatagcttaagtacccgacagctccgccgacaaaaggaatgccaagctgaggtgttttgattttgtatgtggtattcatccagttcagcacttcttttagttcatttcctgtgtaaagagatttgctgtcctgatcagcggccgaaaaacggccctgctcttctttaattgtgagaaatggatgcaggccgataaatgaatatctggaccaagtggatgtatcgtcctggctttcaagaagatacgtaatctccctgtcaagcttctctatcatttgaatgggtgtcagtgtatcgactgtgaaggtctccacaatcggtatcgtgtggtgggacaagctgtcctctaaaaatgcggaaatgtttgattggaaattcattactctcactccttatggcaaggagaatgagaagatggcatgagaggataaaatactatataacaaataaacccaaaagaaagacttcttttgggtagaataaacataatgtctcagctcaactaaactcattctctgctaccctattctctaactcaactcattctaattgctttatacacactcttgtgtatttctaagctgttcttatcgtattacaattcagtattttttgtcaatgataaatcgggcctcaatacgacggctttttctaaatatacatgtctgatctgatcctgagggacatctgtctggaccgtcatcatgactcttatgcactttttcagaccgcctgttacgtccatttcctgcatacatgttaccggtacatactgccatcctgaaagctcgcgaacagcttttgccgggaaaacagcgtgcaaatcaggtgtagccgacagaagcatttgaacaacatcttccggttttgtatgattttcttctatgattttctctaacagctgtttagttttttgtaaaatttcttcttcagtatcccgttcaactgtagttgctccgcgaattccgcgaatcatcatgatgtctcctccaatcgccatttgttcagccagctctcaagttcatttctggaaaatgtatgatcagcaactttccctaattcgttgagcacaataaactgaatcttcccgccacgggttttcttatcattcatcatacggtccaagagaaccgaagtttccgtctcttttctgatttgacttggataacccaggctttttagccagctgaccaaacgttttctgtccatttcacagcctacagtcttttcgcttatatataaagcaaactgcattccgagggctacggcatcaccgtgagtgatctgcccgtatccatattccgcctcaacggcatgaccgagcgtatgcccgaagtttaagtaagctcttatcccctcttctttttcatcctgctgaacgacagacgctttaattgaaatgcctttaaaaatcatgtcattcagctgatcattagtgatatcacgcagtgagtggatattcagcaactcctccagaaacgctctgtcatagataaaagcgtgtttaatcacttctgccattccggacctaagctctttttcaggcagagaacgcaggaaatctgtatcatagagcacggctttcggctgataaaacgcaccgattagattttttccaagcggatggttcacggctacttttcctccgactgcgctgtcatgcgccaagagcgtcgtaggcatttggatgaaatcaatgccgcgcataaaagtggcagccacaaaaccggcaagatcccctacaacaccgccaccgaatgcgatgatgcatgaggagcgatccaaatgaaaacgaatcgcttcactctgcaattttgtgtacatgtccatggattttgcctgctctccactcggtaccgtcacttttttcacaggccatttatcttgcagcaaatggagcatttcatcaccatacaggcggtccacttcttcatccgtgacaagcataatccttgttaaaggcctgtttaaagaggttaatagttcgcaagccttttttctgataccttgtccgataaaaacaggatatgacgaggaagcagtttgaacatgcagtgtcttcattaaaattccctcgacagttttctcatattctccacattttctctaatgcggtcaatttgatctaatccgaattgttcaacgactgcgttcgcaatttcccaagcgacagccgcttcagcgactacacttgccgcaggaacagcacagctgtctgaacgttcaatgctggcagaaaacggttctttcgtttcaatatcgacacttttcagcggtttatacaaagtcggaatcggcttcatgactccgcggacaacgattggcatccctgtcgtcatgccgccttccagtccgccaagtctgttagtagcacgggtgtatcctttttcctcgtcccaaatgatctcgtcatggacttcgcttccatttcggcctgccgcctcaaatccgatcccgaattccacacctttaaatgcattaattgacagtacagcggcagcaagcttgctatccagtttgcggtcataatggacatagctgcccacgcctaccggcattccctcgacaatgacttctactattccgccgatggaatctccgtttgcctttgcttcatcaatggcagccatcatttttttgcctgcctcttcatcgtagcatctgacaggagactcttccgttacgcgctgcaggtcttcaattgacgtatattctgttttttcagctttaacagcgccaatttgcaacacgtggcccgccaccttaatgccaagctcagaaagaatctttttagctacagcccctgccgccactctgacagttgtttcccttgctgaagaccgctcaagcacatttctcatatcacgatgattatatttaattgcaccgtttaagtcagcgtgcccaggtctaggtctggaaatctggcgcttcatttccttttcttcatcttctgtaattggagcggcgcccatgatttttgtccaatgcttccaatcgttattttcaactacgagagcaattggtgaaccgagtgtacgtgcatggcgcaccccgctcataattttggcctggtctttttcgatctgcatgcggcgaccgcggccgtgtcctttttggcgtctggcaagctcaaaattgatatcttcctccgttatgtaaagcccggcaggtacaccctcaataatggttgtcagttgggggccgtgtgattctccggctgttaaatatctcatgacttcttctcccttcatcacattaacgcttttaagtaagactactataacatatttttcagcaaaaagtcagtctatcttttttgataaaagaatgtatcggctgggactaggccaaatttctcgggattgaagatttgctcggtgctgccgacaaaaagaactccattcttcttcaagctatgtgccatttttaaatacagctcttccttcgcgctttctgtaaaataaataaatacattgcggcacacgattaagtcaaagtcttgttcataacgatccgccagcaaattgtgctttttgaatgtaatattctttttgatttccgttttcacttcataacttctatttgcgttttgcgtaaaataacgatctttcacagatagcggcacttcctgtaaagaccgctcctgataaacgccttttttggctttttccaaagctttttcatcaatatccgtcgccaaaatctgatagcccggaagacctttttgctggtccaaaagcatggcaagcgtgtatggctcctcacccgttgagcaggcggcactccaaatctttaaaggcctagaggtcttgattaacggcagaattgcagtctcaagaacttcccatcttttataattacgataaaattctgaaacattgatcgtcattctgtccaatgtttcatttaagagagcttgatccttttccaatgccgccgcaaagtccttaaagctttggaacccctttttctcataaagtgacgttagccttctcttcatttgtgcttctttatatagtgtcaaatcgactccggttaattgtttccattttgttgtaaatacgctgtatgtatccatctctactctcccagtctcgctgtctttttgtcctagtatagcttgttttatcaggaaattgtattgtttcaataaaaaaatcagcttttcagctgattttagatcgttgggaaaggcagaggtctgatgcacactgccaatcaaccctttattcactttaatgtaaacctttacaaaacagatcaaaaaccggcggcgttatatgttgccggctctgttgcttattttcacaatgattaatagatccagcctgccataagctgctgatatgatactaattcttcattcttaaagaaaatgttaatctcgcgttctgcactttcgagagaatcagagccgtggatgatgttttttccgacaaacatgccataatccccacgaatcgtaccaggtaaagcttctttagggtttgttttcccgatcagctgtctcgtcacttcaatgacattttcgccttcccacaccattgcgaatacaggtcctgaagtaataaactcaacgagctctccgaagaaaggcttaccttgatgttcggcgtagtgtttctcagccatttgttcagtcactctcattaacttggcgccagctaattgtaagcccttacgttcgaatctagataaaatgtccccaatgagctgacgttggacaccgtctggtttcaccatgataaaagtcttttccatcatattctccaccccatcattatgtatgtataggctttcacactgcacaccgaaatcgtaacatctttctgataattaatcaatccggggcggagaaatttcttaatatctacaaaaattaaaattttcttttaccgatatattttgcgatggctgcaagagacgagcgtgcgcgccctcgaggaagcgtgtttaatttctgaaaagctttctgcagatacatttcgcttactgccatagatgcttcaattgcatctgtttttttgatttcttcaatgattggttcaagctgttcctgcgttgtctcactgttaatcaatttaagctggttttttaatgcaggatttttcagggcatacagcactggcaatgtgacgtttccttgaagcaaatctcctcctacgggtttacccagctcttcctcagttgaagtaaaatcaagaatatcatcaataatctgataagacatgccgacgtaatacccaaaccagtacaatgccttatgaatcttctcatcagctccagacgcaatggcaccaagctggcagctgaccgcgatcaagagagctgtttttcttttgatacggcggagatacgttctgagattttgttccatgttgtatttgtctttgatctgctcaatttcccctagacaaacttcaacgatcgtctgtgacaaaatcctatgggctttcggttcgttaattctcgtcatcatttcaagagatcccgcaagcatataatcgcctgtgtacatcgcaatacgattgtcccactttgctttgattgtcggttttcctcggcgaagctctgcatcatcaatgacatcatcatgaaccaaagatgccatgtgaatcatttccagagtgacggcgacatatttaatcttattaatatcgtaatcgccaaacatgccagaaagcagcacgaaaacaggccgaatacgtttccctccggcctgcagcaggtgaagacctgcctcgcttaaaagcgggtaatcggaacgtacggtttgttcaagttctctttcgattacatcaatatcgtcatttaaaaaagagtaggccattttaaatttcatatcattcacccaaacatctgtgttttcatttccatccgatatgcgtggcagcgactccgccagtaaacgaatgatatttaacatttttcaggcccgcctcttcaaacaggcctgccagttccttcattccagggaaatctctggctgattcttgaagccaagaatattctttatagctcttcgcaaacagtttcccgaaaaacggcataatatacttaaagtacataaagtaagcctgtctgaatccgaacatttccggctgggacgtttccagacataccacctgcccacccggcttcactacacgtctcatctctttcagtacagtcaagtaatcagggacattgcggagtccgaagccaatggtgacataatcaaatgtatcatcatcaaaaggaagctccatcgcatttccgtgcagcagttcaatttggctgaatccgccgtcttttactttctgctcgccgacactcagcatattttcactgaaatccaagcccttgatctcgccgcttttgccggccgcttttgcaagagcgatcgtccagtcagccgttccgcagcagacatcaagtgctgttgcgccttcttttacattcatgatgcgcatcgttttgtcgcgccattttttatgctgctgaaaactgatgacagagttcatttggtcatagtttttatatattttttcaaatactccgtgtacgcgctgttcttttgagtcctgcataatggtttacccttcttccactttctgatgataggtttgatcttggctgattgtcttcagacggtttattaaaatgttctgaataggtgaatttagaggcagaagtgactcaatgctgtttttcgcttttttaaaacaatcttctaatatctcttcttttgtttttcccagctgtataaaactcccgatcacatccagaaatgcatcatttccgttcataagccgcttaaatacaaaaaaatcactcgacagctttttccagcgcggaaggttgaagtgttccgccacacgatggaataaagctgattcaacgatgccgacactttcgaaaaaatcgttttcgtccttgaaagaacggtcatacagacgaattttatgttcgttgatttctttaatggctgtagcaagcgtccgaatcatgtagatatccttcatttcagatagtaaagagtagtacagcccgctgaaataatcgcccgcgagaacagtcaattggcggtttttgttttcgtctcgttttatgactctagctgtcgtcacttcatcatgggtatcaagggcgctttgtacaagcatcgctgttacaatataattttctctgtcgttgttttttatgtcagcttcttcaaataaagcatgaaaaagaagaagcttatcctcatcaattttcggcgcggaaatatgcttcgctaaataaggatgagacagcttttgttttaatttcttgttcagattggctaaagttccgtagatgtcttgcaaaaatatcacccttgtccccaaattcacatttatttcttaatctatgtatgagttttatcttttcattcgcttacgcaggtatcattatagcataaaaaaaagaaattggctgtatcctcccgctgtttgcgagcatttgcttttaacagcggggacagccagcttattttttttcgcttttcatttctccgtacgcggtttgaatcagtgcctctcctctgactttaatggcagaagtatgctctgtaaactgagcgatgatcacttctcccttgtcgagtttttcggaatggtgaaactttgtgtctgttcctcttgtcaggccgatcacattcactccgtcctcaacggctttaatgacgacaaaatcacttgaatgcttttggttcatttatagcaccctctatctttattagtcctggcgtttaatatgttccaatacttctgcacgggcagcggcatcatctttaaaaacgcctctgactgctgaagtcacagttttcgcacccggttttcttacaccgcgcatcgtcatgcacatgtgttccgcttcaaccactaccattacgccatgcggatcaagcgtttctacgatgctttctgcaattgtagaagtgatgcgttcctgaagctgcgggcgctttgcaacggcttcaacggcacgtgccagtttgctgagtcctgtgacctttccgcctcgcgggatatatgcaacatgtgcttttccataaaagggaacaaggtgatgctcacacatagaatgaaacgcgatatcttttacaagaacaagctcctcatggttttcaccgaagatagtctggaaatgttcttttggatcttcattcaagccggagaatacttcggcatacatctttgcgactcttttcggagtatcaagaagcccttctctattcgggtcttctccgatcgcttctaaaatttgacgaacagcttgttcgatttgctctttattaacttctttcatgttctatgtcctccaccaatgaatacatttaatttcgattctagcacatatgccccgctaaaagcaaagtgaatgccctgtcaggaagcccatgctcttgaaatatgaaaagccccttagaaaggggcttttctgtgaagaaataaagtgtatgtaagctagatgcatacacgatctatattcacaattattttccggcaactgcgtctttaagcgctttacctggtttgaaagcaggtactttgcttgctggaatttcgatttcttcacctgtttgaggattgcgtcctttacgtgcagaacgttcacgcacctcgaagttaccaaaaccgatcagttggattttatcaccgtttttaagtgcatctaagatcgtatcaaaaacagagtcaactgcttttgtagcgtcttttttagacaattcgcttgcttctgcaaccgcattgataagttctgttttgttcatgcctttcacctcctcccaaaaggatacattcagttcgtttattatcatttcttcacagttcagtctgattctaaacctgtctcagaaaaaaatgagagcaagtaagagaaagacaattaaacggctttttaagaaaaactgcactctgaggaatgtttgtccaacaaagtgaagaatttctgtatgtagagtaacacatataaaaagccatatcaagcattttaaagcgtcaatcccttgctcgtcaaggatttaaggtgatttaccgaacaaatattcctttttttccttttttcatcctattccttgatccttttccattattaagaacaaagaaaaaagacctcccattctataaagaggtctaccggtattacaggatgatggcgattaagccgccagagccttcgtttatgattctttctaatgtttcttttaatttataccgtgcgttttcaggcattaatgacagctttgcctgaatcccttctctcacaattgagctcagcgaccttccgaagatatcggaattccagatggagagcggatcatcctcaaagtcctgcattaaatagcgtacaagctcttcactttgtttttccgttccgataatcggggcgaattcgctttcgacatcgactttgatcatatggatcgacggagcgacagctttcagcctcacaccgaatcgtgagccctgccttataatttccggctcatcgagactcatatcagctaaagcaggcgctgcaatgccgtatcccgtctgtttgaccatttttaaggcatcagacacttgatcatattctgttttcgcatgggcgaagtcttgcatgagctcaagcagatggtctcttcctctgatttcgacgcccacaacttcttttaggatttgatcatatagatgatcaggcgcgtacaaatcaatttctgccaccccttggcccagctcaattccggctaatccggcactttcaatgaattcaaactcgctgaattggccgacaaccctgtctacgtcccggagccgtttaatatccttaaccgtttccttcacggactcctgatagctttcacgcagccaatggttttctttcagcaccattacccagcttgggagattgacattcacttctagcaccggaaactcgtagagggcctctctgagcacactcagcacatctgattcccgcatgctctctacactcattgccaataccgggatatcatatttttcgcttaaatcctggcgcatggcttccgtttccgggtgatacggcctgactgagttgatgaccataataaaaggtttgccaacctctttcagctcttcaatgactctttcttcagcctctatatagtcacttctggcgatatctccaatggtgccgtctgtcgtaatgacaactccgatggtcgagtgttcttgaatgacttttcgagtgccgatttcagcagcctcatgaaatgggatcggttcttcgtaccaaggcgtattgatcatccgcggcccgttttcatcttcgtatcctttagcgccgggcactgtgtaacctacacaatctactaatcttatattcacatcgagtccgtctgacacatgaacagacatcgcctgattcggaacaaatttaggctctgtagtcataatggttttgccggctgcgctctgcggcagttcatcctgcgctcgggcccggtctgcttcgttactgatattcgggagcaccacaagctccataaattttttaatgaacgtggattttcctgtacggacagcacctacgactcctaagtatatatcgcctcctgttcgttcagcgatatccttgaaaatatcgaccttttccaagtgatcccctcccggacttcctatccttttcaattttattaagctctttcaatcaaacacaggacactatatgtgtatgacgttgtcctatttgaatatgacatctttagaaaatttctcatcctcaatctattaaagtataaaaaaacctttctccctatttgtatgcaagggagaaaggttcattcctttttcatatcattttctaaaaaaacaggttcctgtttgtcatttaccgtatattttacagaaaacgcggggacaaagggggtatcctgccaaatcatatcctggatttcagtcccgggtttaaacgtttttttgctttttttgaggcaagaagccagctcagtccggtaatcggcatatatttctccgtctccgtcaatcataagcggcaaggaattccctgagattgggcttgtcactgtaagagagcttccatccccaagcttcttctcatcgagtgtaaataaatcacgagatagcacatccttgtaaggcggatattgatgctcctgacgatacatttggatgcgcaatttcacatcgcgaattttttctgccatctttagatcaattaatttaacagtcggatcgttctctacgtcaacaagcacgtattgatagtctcccccgctttcaaatgccgtacttggaggttcagctatgtatcttggcgctaaccggttaaagtctatcggatatttttgatatagcggtgtcgacatatctttggtttgaataggaagcagccctccatttgccttttgaaattcatcaacagcagattgaacctgctttagctggtcttgataaggaatggcatgcacactgcttttccgttcatttggatataaacatccggataaaaacacgactgccgcaaaaatgattgcgcacttcagtttacccatacagcacttccttttacagctttattcattgacagggccgctaaaaaccacgacaaacacaataattccagatatgagcatacacatgtatgcgaatgatgaaatcgcaatcttcaaaaaacggttttggcacttaaagcggcttaaatagatggaagctacagccagaaacatcagacccatggaccctagagcaaaccacattttcatcaatgccagattcaatgacgtgcgcctccccgatatgtatgatgtaagcgttatattatattttaatatacagcgccggaaaagatcaaccagattttccatccattgatagaacaaaaaaactgaagcaaagagggggaccttcgcttcagtcaacttgactatattcacctgcacgtttaagaaacactctcttggacttcgatgctatagtatgcgacttggcatacagatgcatcctctattgcctaaatcggcaaaatgtttcaggagatcccaagacttgggtgttcttctgtttttcgggctttcgttcaattaagatatgcgtttcatcataccattgacacttttacttcacttgattttcaaacgtatttaccaaatcctccatctcgtgggttttccctcttgccattaaagattcaacagcggtttccactttttgtccgttgaacaggacctgatggagagcttctgtaatcggcattttaacatcatatttcttcgaaagctgataagccgctttcgtcgtgcggacgccttcgactaccattcccatctcttcaagaacatcttcaagcttgtacccttttccgagcaaattgcccgcacgccagtttctggaatgaacacttgtgcacgtcacaatcagatcgcctactcctgtcaatccagagaacgtcaagggatttccgcccattttcgttccgagtctcgcgatttcggcaagtccgcgtgtaatcaaagcagctttggcattgtcgccgtaccctaaaccatctgtaattcctgcagcaagggcaataatattttttaaagcccctccgatttcaactccgataatgtcaggatttgtgtacacccgaaaattgtgattaataaatagatcctgcacctcttctgctgccctcatgctctttgaagatgcagtaacagttgtggggtgccgcagccctacttcttccgcatgactcgggccggaaaggacaacgatatcttttctgacatcactcgggagctcaatttccataatttcagaaatgcgcagaagtgaatctggctcaatacccttgctgacatgaacaaagactgcctttttcgttataaaagggacagcctgtctcagcacttcccgaattgcttttgtcgggaccgcaacgataatgaaatctgcgtctgaaacagcctctttcatatctgttgttcctttaatggatgtagacagcttaacattcggcaaataatctttgttttcatgcaactcattaatttgatgaattaaatctgcacggtgagcccacacacacacttcatttccattatcagttagaactaaagccagtgctgttccccaactccctgctccaagcattgtgacttttttcatgtttgattcacacctttttattttctagctcttgcaaatattttgattggtgtcccctcaaaaccgaacgcgtctctgattcggttttctaaaaaccgttcgtatgaaaaatgcatcaattccggatcgtttacaaacacaacgaagcttggcggctttaccgacacttgagtcgcatagtaaatcttcaaacgagaaccgttatgagtcggtgtcggattcattgccacagcatccatgatgacatcatttaagacgttcgtctgaactcgaagtgaatgattttcacttgctttaataatcgcaggcatcagcgtatggatccgttttttcgttaaggcagacataaataggattggcgcataatccagaaattgaaaatgatcgcgaatattttcttcaaattctttcatcgtgctctcatctttgtcaacagcatcccatttgtttacgacgatgacgacggccttgcccgcttcgtgtgcatagccggcgatgcgcttatcctgttcaataatgccttcttcgccatccagcacaaccgccacgacttctgagcggtcaatcgctttcagcgcccgcagtacactatacttctcagtcgtttcatagacttttcctttttttcgcatacctgcagtatcgacaatgacaaactcctgctggttgtaagtaaatgacgtatcaacagcatctcttgtcgttccagccacgttgctgacaataacgcgttcttcgccgagcatcgcattcacaagtgaggactttccgacatttggacgtccgatcagacagaattgaataacttcttcattgtatttcgtttcaggaatgtttttaaaatgctctgcaacggcatccagtaaatcacccagtccgagtccgtgtgttcccgaaattggatatggctcgccaaagcctagcgaataaaaatcataaatattcgctctcatttctgtgttatccagtttattaaccgctaaaacaacaggcttttttgtgcggtacaaaattttcgccacttcttcatcagcagctgtcacaccttcacggccgttcaccataaaaataatcacgtccgcttcatccatggcgatttcagcctgctggcgaatctgcgctaagaacggctcatcaccgatatcaataccgcccgtatcaatcaaattaaaatcataattcagccattcagccgagctgtatatccgatcccttgtcacgccaggggtatcttctactattgaaattctttctcccgcaatccggttaaagattgtggattttcctacatttggtctcccgacaatggctacgacaggtttacccatagtacccttcctttcaatccagccgctttcatttttacataaattttcaaccggttattaaattcatttcattcacttttatgaaaagaaacccttcagaggaagggcttaactcatttattatatcagtttttactgggatcacaactattcttaaaaatgtttcacgatcaaatacacgtcatctccgattctgtgagctattccatcaaggatcgcctcaagatttttagcgaaaagctccatctccttttggtcattgcaaaaaaagacaggtgctccccctgcaacccggtttggatttgtcgtgattacagacaaaatcactttcgtaagagattcactcatcctatcaccttatcctgattcttgataaattcagtcggcattctaatcgcattttccaaggttggaacattgctaataatttgaacagccgtttcgggatggtgaatttgcgggagaacaaatactgccactctcccatcatttaaatcccgttttgcaattggtgtcaaagatggctctcctgaatcccgataaaccccgagcacattggaaacatcaaataaaatggcctgacgctgccctaaatttgctatcgtcgctgctgaattaaagtttttcggcgttaaaataaagcccatgccatgctttaaaatcagttcctgtttctctggaagcccgatattcatcatataaatattatcaacaaacagtcccggaccgtcaaagcgcggctttatgtactcgatgtctacaatatccttcaacacactgcccgacataaatttcatggccagtaaaaaacaaacgacagccgctatgacagcagcccagatggataaaaacacatacgcagaggttgtcaaaagcgctgtaaagatcacaatataatttctgctttcaaacgcaatggcaatcccctcaatatatgtgctaccccttgagacaagttcatacgaatccatttgcgtcaatgtgttccgctccatgtttcggacatctctaaattgcgtcgctgccaatgttaaaaatgtgatggccgtaaattcctcctgcaaaagcgccggcataataattgcacctaaaccagccgctatcaaccccagtgcgatgtgaatcactttcccatgaacataggtcggatactggcggtaatccgttttcagcatataaagccttgtcgcaattccggcaatgaccccaacaataatcggatagatgtaatcactcatgacattttggtagctcctttgtttgatcttttgcttttctgaccaatctggcttgcgaggtattcgtatttagatatgccaaacagcaatatcatccccgcagaacacgcattcagccattgaaagccgccgacagccatagccccggccaacttctggatcacaaatgaatacaccagttcgccttggcacatccctaggacaaataagacaagctgcttctcaaaattcctatcaacagaagctgttaaaagcactattaatataacagcagcccactcaggttttatgatgaaccaaaccgggtcatataatgcaaaaagataaacaaacgcatacgcggaaacaagcgtcagatagaccatgatgtaacgaaaacgatacattcccaaatacccggcatagacacatccgcaaacgaaaaacatcaaatatgcagcattcagggaaaaatataaagcgatgtcatgtatgcttagaataatattagttaaaataaagacagagacggcaattcgtcttttcgtcttttcaaaaataaatgttgtcagaacccacagaaaccacattgaccaatagtaataaaattgttccattttacttcctccatattcccagtatggagttcaagcacattttttaaacaatcgatctcatattaaggagtatgatcatgggaaaagacagacaagagaaaaaactcaaagcttcaggcagagtcgaatcagaccgcgaccagtccattcactatgacggagcgacaagccttgaacaaaacggaagattcaaaaagcgaaaatcataatacaaaaagcccaaaccacatatggttttgggcttttatcatttatcgcacactatagcttgatgtattgatccctctctctgtgagccaatgatgggtttcacctttgatcacaaggggcgccttttgtaaatcggcaatcgttctggtgcccagcacggtcataatcatctttaattcctcaaggatcagctgaatctcctcaagcagtccttcctcaccgctgtcagtcagggcttttaaaaaatgccctgccattccggtgcaagaggccccaagcgcaatggcctttgccacatcaagtgcatcttgcagaccaccagaagcgatcatggtgcttgcaggaaactcggagcggatttccgccaaacttgcagcggtcgaaatgccccacgagttaaaaaaggagatttgccgctgtcttcggagattttcgattttcgagaaatttgttcccccgtaaccgccaatgtcaacagctgcagcaccagcttcatacagctttcctgctgattctttgctcataccgaatccgacttctttcacaatgactggtacgctgacatgactgcaaatttgttcaatgcgttccagtgcgccgctaaagcttctgtctccttcaggcatcacaatttcctgaatcacattgaggtggatctgcagtgcgtttgccccaatcatctcaacggcttcctttgcctgggcagccgttgcctcgcttcccaggttggcaaaaatcagcccgtttgggttttcctttcgaacaatttcataggaaagacgctctgatggatcttttaatgctgacatttgcgatcccacagcaaggggaattccagcctgagaagccgctcgcgcaagcgatttattaatctcatatgtaagttttccaccgccgccagtcattgcattgataaaaatcggcgaactgcttgaaagttcgccgatttttgtggaaatatctacttgttctaatgcaagatcgggcagactgacgtgaacaaacgtaatatcatcaagacctgtttcccgcttctggccggtggacaaggcatgattgatgtgttgtctttttcgttctgctcgagtcacgtttatcaccaattattttagtttattcagcttatctccgatcagatctccaagctggaagccagtgcttgtttcttccttcgcttgatattgacggtaatcttcctgatcagctttaggcgtttcttcaagttcacgcatgcttaatgaaatgcgctcctcattttcattcacatcaagaaccttcacttttacagtctgtccttcttcaaggacttcatgcggcgtgccgatgtgtttattggaaatttgagaaatatgaacgagaccttcaacacctggaaggatttcaacaaaggcaccgaagcttacaagacgctgtacagttccttcaagcacatcgccaggcttcactttttcgccgatttggctccaaggtccaggcagtgtatctttgattgataaagaaatacgttcgttgtcacggtcaaccgataacactttcacttttacttcttgtccctcttcaacaacgtcagacggtttctctacatgagagtgggaaagctgtgaaatgtgtacaagtccgtcgatgccgccgatatcaacaaatgcgccaaagtcagtcaggcgctgtactttgccatcaagtacacttccaacttcaagagactgaagaagttcttgttttttattcgcttgctcactttcaacaacagcacggtgtgaaaggatcacgcggtttttatcacggtcaagctctacaacgagcagtgacagtgtttttcctttatagtcagtgaagtcttcaacgaaatgtgcttcaacaagtgatgccggaataaaaccgcgaacgccgatatcaacgacaaggccgcctttcacgacatctttcacttcagcttcaaacacttcttttgtttcaaattttttctcaaggtcttcccaagcgcggtctgcatcaacagcacgtttagataaaatcaaagcatcgtcttccacttttgttactttcaggtcaagctcgtcgtctactttaacaacatccgatgctttctctacatgaagacttgataattcactgattggaataataccggattgtttgacattgatgatttctacatctacatgtttgtcttctacctttgtcacaatccctttaactacatctccaacctctggcacttgaacatcaatttgattcatttcctctgtcatttgaataacctccttggtccaaacctacacagcttaattaaaacggtttgaaagctgaacatataacatgcccgcttttagccgaatatgtattaaagaatcatccaaaaaagttttttgaatgatcaataaaaagttttattagtattaacttctaataaaaggacaggtttgtcaagcaataacattctatcttcgttgaaaaattcaaaaaaagtggcatttgccatcctcagcgggacttttgctccacagcctcgaggattttatcagctacctcttgaatggaaagcgatgtcgtgtcgatttcaagagcgtcttctgctttacgcaacggagatacttcgcgctctgaatcaagcttgtctcttcttgcaatttcctcaattaatgtttcgaagttgacatcaaagccttttttcacattttcttcataacgacgtttcgctctctcttcaacagatgccaaaagaaagatttttacttctgcatttggcagcacatgcgtcccgatgtcacgaccatccatgacgacgccgcctttttccccaagctgctgctggcgtttcaccatctcttctctgacacttctgtgcttggccgcaattgaaacttggttgctgacttcatctgttctgatcgcctcagttacatcggtgccgtttacaagcactttttgtccatcttttgttgtaatcagctcaatgtctgtccgctttagcagctcagccagtttttcttcatctgtcagatcaacgttttcctgtaaagccgcgtacgtaatcgcccgatacatcgctcctgtatcaatatatatgtacgattttttctcagccacaattttggcaacggtgcttttccccgcagctgccgggccgtcgattgcaatcgataatttcttttccataattcctctccttgctcttttctcctctatggattgtatcacgaactttatgaaaaagggtgaaaaattgatgaataattaatgtttgaaggtttcaatcctattgttttcctccattttatccaccccttcatattgaatcacttttgatacgtatggttcaatatgctgatagtgaaaaagaaattggacaccaagtaaaatgatggcctgaatgaacaataatttgatcagcagccgttcaaatgttttcattggagcacctccattacaaatagtatggaagtgtttgccgatgtttattccattcgggcctttcttctcttatttaactggcgcctgatgcagtattgaagcaaagcctgctggtcacctgctgcaatttctgaatactctaaagtcatttttcgtttttctgacttggggtcattaaagattcgtctgacaactgcttctgtttctatttgacgtgtgtgctcctcttcaggaagacggatgatcaggcgcaatgattcccccgattgaaaagaaaggccatcagctaaaaccacggcgatgccgcctgcactgatgttataagatagtgtgcggatctcttcctcatttcccggctgaatttgcacatctaataccgcatcagttcttacatattggcggcgctggattcttttcattttttcacggggaggcacttcaagacagatcatttgaagtttgtccttcactttaccttttatacggcttataaagcgataaggaacttcgtcttttcccacaaactctaccgttacttccatatcgttatgtaaaatcacagttcgccctgtaactacatcaacaggatacgcgatcaaaagttcattgttttcgatgctgaccgccttgctttttgcctttttcaattcattttcttctatatattctaaaagtacagtttctccaatctctatcattgacttcactctttcgcattcaatatactcacgtttttattaaagcacgtaatgaaaaaaaggaaaagacatttagtcctttcctcctgttttttataggtctttatatataggttctgcattttttagtttttcaaccttttcttccgatccgtctttggcattgatatacattctgaaagtgtcattttcaattgttccaagcatttcgtaacataacacttcttgacctagttcatttgtaatcaaagcgagccttgtttctctcacttgtacatttttatttaatttagactttgcctctgcttcagtaattgcaggcttaggtatggttctttttctgtgagatgtgaggaagtctcttgctgaaaagccgacaacctcaccgtcatccaaggccactttcatacgaattgcctccgggtacatccggactttattttcaacaggaacatatgaaaatacaccgattttatcatattgggcactttcatcaatttccaaatcatctgtttcaaatccgtttttctttaaaaatgcaagcgctcggttcgatccgtcatttaaactgattttctgatctttcacttccctgttttggatcaagtataccggatgcccgcccttcttcgtaatatccatataaatcactgctttatggtctgggtctttcatgctgatgctatatacatcgcgatttgttttttttccgctctttaccactttaattgaataattgtcatctggggcaaagcgctcagcaatttgttttgcttcctgttcggaaatttgttttcccttcagatggctgaagcctttctcttcttttttcgtactggtgaagctcgggccaagatcagtgccagtggagaatgcaccaacatttttttcgactgttttaaagctgttgataatcgtattatcactttgtttttcgtcagaagccagggccatttctacgtccatccagcgaaggtttttgctcatgacaaggtgctgaacatgacgcaattcattttgtatatcttcggactgctgatatagcttatttagtgatgtatactcgtttttatcaagcggcttttggtccaaatctctgactgacgttttatagctgaaatcgccgatctttgataatagctcttcagttttattaaacggcattaatgtaagcggcagctgactgacactgttatgagcttctgatgtaatcctccacacatcgatcaatgcaggcgacagtgatttttggctgttcatggcaagtgttgttccgattttatcatgaagctgatccatctgataggtaagctcatgaaacgcccgctgatagttattttcagcatgaagaagaactgcgtctttttcctggtgttctttgtatccccagtagcctgtaccgactattgcaataccaagcacggcgattaaaattcctctgatcatttatcacacctctttttatgctttctcatatctgctactcacagaaaatgtgtttaccgattcttttaatctgcggacgcccccaaatccacggacttgtagccgtatccggattaaagtagtaaagtgcttcccctgatgggtcccagccattgatggcatccagcactgcttctcgtgccgtttcattcggctgcatgtaaatttgtccgtcggctactgctgtgaaggcaagcggctcaaaaataacccccgctactgaatttggaaataacgggctgttcaaacggtttaaaatgactgctgcaatagcaacctgcccctcgtacggctcgccccgggcttcgccataaaccgcttgagcaagcagcctgatatcgttgttggaaaatccaccaggcatgttcgctgctaccgcatcctgttttcttgcttttgctggtgtattgttttgctgtttattcgcattcgctttaggctgctgcgttgttttttccgcaggctgtttctgccgtgcttctgcttgttgtcttgccttttgtgttgctgcttttgatggtttcgtctgatactttagcggaatttttccgtaatgcgtgaatgtattccctttattgagctgttccatgacatattcacgatagtattttgatttacatattaaggtttgctttgttttagctcctacaaggccgtcaacctcttttaacccgaattgatcctgaaaatttcgaactgcccagtacgtcccccatccataaaccccgtcaatttttccgttataatatccgttgtattgaagacgcgcctgaagctcgaccacatcatccccggttgcccctctttgaatgacctgattcgaaaaggcagagatcgtttcagtattaataaacgccgttattgtaaaggaaaaaaggatgagacatgccataatcgatcctttggacttcatcttttcaagcctcctactgcaaatttttaagtgtaatcgtattttctgtaacgaggttatttttatacactctttccttgttatccctcagaacataaaaactgcacacaaaaaagccgcacggttgctgtgcggcttctatacttgcatcatattaacggaacgggcttttttcgctttacgcaaaccaaaccaccataaaaataccataaatggaagcatataataaatccaattgctaagcgctgttaggataaaatcatatgatccatgcaaaagggatgggaccactaaagaaagagtaagccactttacacgcgccttatcagcggaaaaacgggcttttccaaggtaaaatcccattataacgccaatcaaggcatggcatgaaacaggcagcagcgccctgacaaacgcatgctccacgccgtggccaattaaataaagaatattttcgagggttgcaaaaccgagtgatacacttgtaccgtacacaatcccgtcataatgctcatcaaagtgggcgtgcgggtaaacactgatcatcagtataaaccattttaatgattcctccaaaaaccccgaagataaaaaagaaacgaaaaagcttccgcctcctacattctctttttcaagtacatactggataaacattatgggaaatacaagaacaaccccgagaaaaaacgaccgtagcaccatatgtacaggttcattatcatactgatcttttaaataaaaataacttaataacgcgatgccgggggcaattcctgcagagatgattgcaaacatcaggcaacctctttcctttatattcctacgtctatcctaccatgttgtttaaaattttacatctgtctgcacttaaaaaaacataaagagcatacgaatgcatcatatgctcctcatctttaatggttttctcttttggcgatttccgctgcgatatgcccccgtgaaacctgccgttttcaataaatatttcatttgcattgtttcccgcagcaataacaccggcaataaagacaccttcaacgttcgtttccatcgtttcttcgttgaaatatggacgccctgtttctttatcaatttcaacaccaattttttcaagaaattgatgatcaggatgatagcctgtcatggcaaatacaaaatcatttttaatggtaatgagttctttctctccggagcgaaacacaacttcatcctcggtgattttttcgacacaagcgccaaattccatacggattgtaccgtttctgacgagagcttcaaattccggcagaatccacggcttaatgcttggagaatactcattgcccctatataaaactgtgacacgcgccccagatttcacgagttcaagggcggcgtccacgcttgaatttttcccgccgatgacaacaacatctttatcaaaatacgggtggccttctttaaaataatgaaatactttcggcaaatcctcaccgggtatattcatatagtttggatgatcataatagcctgtggcgatgatacaatatggcgtcgtgtaggtctcttttgacgtctcaataacgaatgtgtttttttgcgttttcgtcactttatgcaccatttcaaacgcattaacacggatgtttttccgtttaacgacttcccggtaatacgataaagcctggattctgacaggcttcctgttctctgtaataaatgccacatctccgatttcgagcttttcacttgagctgaaaaaggtttgatgcgtcggataattgtaaatactgttaacgacattgcctttttcaatgacgagggcatcaatgccaatttgttttaggtgtatggcagcagatagtccacaaggtcctccgcctataataattgctttttcttgaatcatttctgtcaactcctgcgattggcatttcacttcatattttctatttccgaataaaaaaatctcctattttatcataggagattttttatttttatgcaaatcatcaacttatatccagcctctaaaacgcgaagcttcagccattttgcgaacgccgaccatatatgcagcgagcctcatgtcaattcttcggttgttagccatttcgtaaatattgttaaatgatttgaccatcattttttctaatttttcttctacctcttcttcactccagtagaagccttggttattctgaacccattcaaaataagaaactgttacgccaccggcacttgccagcacgtctggtacaagcagaatgtcccggtctgaaagaatttttgttccttcaagcgttgttggtccattcgctgcttcaacgacaattttagcccggatattatgggcattttcttctgtaatttgattttcaatcgcagcaggaacgagaatatcacaatccagctccagcagctcttggttggtaatggtatcgttgaaaagctttgttacagtaccgaagctgtcgcgtcggtcgagtaaataatcgatatcaaggccttccggatcataaagtccgccatacgcatctgagatgccgacaacttttgcccccgcatcatgcataaattttgccaaatagcttcccgcgtttccgaagccttggacaacgacacgcgcacctttaatatcgatgcctctcttcttagccgcttctttaatacagatggtaacaccttttgctgtcgcagattctctcccgtgagatccgccaagcacaagcggtttgcctgtaataaatccaggcgaattaaattcatcaattcttgaatactcatccatcatccaagccatgatttgtgagtttgtaaatacatccggtgccggcacgtcttttgtcgggccgacaatttggctgattgctctgacataccctctgctcagacgctccagctctctaaacgacatatcccttggatcacaaacaattccgcctttaccaccgccatatggaagatcaattatgccgcattttaaactcatccaaattgaaagcgccttcacctctttttctgttacgttcgggtgaaaacgtatcccgcctttcgttggaccgacagagtcattgtgctgcgcacgatatcctgtgaaaatctttactgaaccgtcgtccatacgaacaggtatttttaccgttaataatctcatcggctcttttaacaattcgtatacctcttcgggatatcccaatttttccagagccttatgtattacggtttgggttgattttaatacatcaagtttgtcctcttctgtatgaccggtgtttcgatcggctgccatttgagttaacctcctagaatcttctgtttctcacatgctccctttcagagaatagtatacaccttcatatgatctgtgcatagaataaacgttatgtttttccatgttttttaacgaaaaaaaactgctgaaatcagcagttttccgttgcattcttatgaaaaatgagtttgtatcgtctctacggcattaccgtccataatgagcttaccatactcttgcaggcgataaatcgttaaagttgtcggattgccgtattcagccagaaccgccacaaccccttcagccgtatgtgaccctagatcttcaaggcttaaaaagtactgcccgtcatagtggtagacagttccccctgtgataccgattcgctgtaagctttctgaaagctgaatgatatcttcaaaggaatggaattgatatatgatgtccgcgctttcatcaagcttgacttgcatttcgatgtaatcatcatcatactcatcgtcttctgaatcggcgtcttggttctttgttacaatcacgaccatcccttgtgcttggagagaatacacttccactgcaatcggtccattcgcttcaaagccgagctctgtatttgcttcattcatcatatctttaaataactggtggactttgaatgagtccttccagaggtcttcttttgtcaatccccggtctgtcaaatcatcgagggttaaaaagattttgatcttattataattcagacgctcaagccgcataacgttccctcctgcctctacttgcacacaaatcatataacacattatatgagatgatgagtcataggttcttaattgttatcagtttacactgagttcactagtaagacaagcacaatgcagtttttattgccatatggatttttgctttttagaagttattctggcccgcaaagagtcacaatgtgtgtttcaggctcagcacctaaacgaagaggcacttttgtcgtgccgtagccgttgctgatcagatatgccgcgtttttaacaatacctgttttccccagttcataaggaccgaattttccaaacctgatctggcctccatgggtatgtccgctgagtatcacatcaataccgtcatcttcattgatttgttcatgaatctccggattatggcaaaccagaatattcagctggctttcatcaagttctttgatggcttcttcataatgatccatctccatcctgatatcatcaacccccgcaatcgcaatcgtatgcccattgtatgaaaacgggactgactcatttctcagagtgatgacgccgtgcgctttaaatatggaatacagcttatgctgcctgacttcataatcattattcccccacacaaacacgatagggaccccgaaatgtacgagccttttgatgttttcctcgattctcgcactgggcaccccgccctcagctaaatcaccgccgattataaccaagtggggggcatggcttcgcgctttttctaaaaggtcttgatcgatgagacgtttgtgaatgtctgaaataaaaaagattgtcagaggcggcttgcccttcatctttgataaaggaaacgtatgtgtcttcaaatgattgccttttgctgttgcatacatttttgccgtcattgccgctgccgcaacagttagtacaccggcaattttcactgatagcttcataaaaaaactctccattctttttagaacttatcaataagacggacaataaaaaaaagacgtttctatcgtttgagaaaacgccccattttatttactttcaaaatatagattaatgtcatatttgtgcttcatcatatgaaaaacagactctctcgccttccatttatcgggctgcggccagagatcagtgcttttctgaataatttcacatctcagtttatggaaatcagtctcggatttttcttcctttttcttgaaataatatgaagtacagtaggcaaaagcggttgccagcatccaaaataaataaaaggtatggctaagtatttcttgaagtataagctgaggctccgggcttttgatcatgatcataacacataataagcctaggcagataagtgaagcccatcgccatctgcggcattgtgctgcataattttcgaatttttgttttcgttttaccagcgcttggagcatctgtttggtcggcgcgtctgtaaactgatccagctgattccataaggattccatacgcttcacaccttgtccattttcattgctacaatatatgaacgtaaaataaaaataataccctattcatccattaaggggatgtccaaaacttgtccggtgtaaacatcatttccattcagatgattatacgctcgaattttttcttctcctgtccggcttttataatacttcatggaaatgcggtatagcgtttctttcttttggacggtgtgcttgacaacgcgattcggcacattttgaactggctcagctggctgttcttgctgttgtactgttgattgggaagaggaagcagccgcggcggttgcttcctccttatttgccgagtcttctttatccgctacagcagtctgtttcttatcagcagctgtttttgccggctcttttggcttggaatcttcaggctcttgttttgactccttctgcagtgcggtttctttagtgtctgcggtatcgtttttatcctctgatttcgggacaacctcatatttgctttggctgctgtcaataaaaacatcttcataatcgtcatgattatccgggtggctctttagataaaataaggtgactaaaacgataaccggcacaaatacaaatattactgcgagtactgtgaataatggcgtttttgttttgccttgcttttttttctgttctctttgattttttacagattgtcttgtcggaaggctttctccatcatcgacataatcgtccgccaatgcggcgttttgatcttcataaagattctgggcttttcttctctctactctcgacatgttcgtcatgtttatccctcctcacatgttcaaaacgaatctgacaggcaaacacggcatcaatgataaaatgcgccgtcatcggaacaaataagttgccggtccattcatacatcagaccgagcaaaaagctgattgctgtcaccataataaataacagccattttgacaaataccgaaagtgcagagcggcaaatataaggctggccgcccataaaccgatatgagtctgcagcactcctctgaataacatttcttccgcgaaagcaatcagaagcgttaaaaatataatatgagggattgacctcttactgaatatttttttattgattccgccgtcatcatataaatgagacggaaaccatttcattactgccatatcggctaaaataacaataacagctatagaaacaccataccagatgattcgcatatcgcgaatgtcccagagctttaatacgtcccgtacatcctcaaaaaagaacagtcctgctgcagcagcggcaaagatgatgagtagctgcgtcaaatataactgcttcagcatatcacggtcagacatatgctgaatataatctttttgctgtttcagttcagctcacctacagtctgcaagctgaatatccggtgcaattccgaactccagctgtctaatggcgccattttactccgttcccctttttgttcatacaaggataaatcaaaaccgcaatgtgaacagcacgggaggtttccgtcatcaggctcgtatgattcatcaaagtaggttaatagtgcctgccttaaacagccatcacgctgaagcaaaaatgatacacggtgcattttttccagcttcagctccatgcgatatgaaatttctttcttcatcagttcaactgatgttttcccctgcataaagagatgaatcatcatacgggcctgtgtctctccgacgccatactgaagtaatacgtcacgaagccttctctcatcccgctcctccgtcttctctagcacacggatcacgtcggcgatttcttcagctgtgacactctccatctggataatctgttcctgcaattcaaaatcccctggcgcccgcagcaaaatgctgacactcggctttccgtcgcggcccgctctgccgatttcctgcataaaagcttctgccgtctgcgggaggtgaaaatgaatcacatatctgatatcgggtttatcgacacccattccaaacgcattcgtacaacatatcacatcaagctggttatgaataaactgctgctgaattaaaatccggtcccctgactccaaaccgccatggtaaaagtcggctctgctgctcgttttgctattaatttcacccgctaattcctcggcccatttccgtgtcggacaataaacaattcccgggccttgcagattttcaaccagctgaatgaccctatctattttttcggcagtatccgccgcattttcaaccctcagtgcgatgtttgggcggttgactgagttgagatggcgtacagcatgctgcagctccagcaggttcatgacatcttgcagcgtttcctttgtagccgtggcggtcaatgccagaacgggcgggtgaccaagtttttttctcagctgcccgagctttgaataatcaggcctgaagtcgtgtccccattcagaaatacaatgcgcttcgtcaataacaaataggctgatcgggacgcttttcaatttttccaatacatatggagactgtaaagcttcaggagacaagtacaaaaatttatatcgatgaatatgttctaaaacaaattgtctttcctgcctgttaagcatgctgttcaaagctgcagcacgcttttccccccgggctttgagctgctgcacctgatcctccattaaagaaagcagtggagaaacgattaataccatgccgtcaagcatataaccaggcagctggtagcaaagcgatttccctcccccagtcgggagcattgcaatggtatccttcccgctgagtatgctttcaataatgtcctgctgcccttttttaaaggaagtaaaaccaaaaaactgatataacgtttgctgtaatttagtcatattgctgcacctgctttgtcaatgccagtctgatttgaaagtagctgaaccgctgttccagcccgtcgcgaatttgtttgattttattcgtccgcatccgtttggcaaactctgcgatttgaagctggtcttctgctgatacatagtcattaatcataaacgcaggctcatggagagaaatctcgacaatgtggtcttcaatcgtcgctgttttcagctttctgatttcagcaattcgctgtatcggaaacccttgtttgaccatctgccatgttttcctcgtcgactctgtcagggcattatctaagtgcacatcagaaaggagatcctttaacaaagcatcttcacactccggaagagaatgaataaaataatgtaccgaagcccaaaacatgatatagacataccattcgtcttctttcagcgtatcagcaagctgcctgctcgtataaccgatccgatggtgcgaggttaaggagtagacaaaaatttgcgctgctttgttttcaatctttttcaaatgcgcctcaagcatggcaaaaaggctttttgccatctctatatgatccgtatgccgggacaggtatttctttacccagtgaagtgtcttatgatcctttgtgacagggatatactgcctgctcccttgctgtttatgggataggacctgcacaagcagcgaaagccttttccaaagcacgccggcagcctgctgataatgagcgccgtgacaatgaacgggccaaggccgctcgctaagggcatgtctcaaaactgctgcgccgctggctgtcactttgtatgtatctgattcagacattggcgcgagatatgaatgcttttcaagcttgtcaagcgacgcagaaatatcgcttctcgaacattttgccgccattccaaagtattttgcagtctgaaataagccggcatcttgaatggtctgtgacgatctcttgcctttgaataggtgaaaaacagcgcttcccgaccgttccccgtttattttgcaaagacaatcgagaaccataatatcgaagtaatttaatgacaacctatccacctacattcttcctgacaaaaatcgttgatttgctctttttattttaacagatttcaaacagaaatcgacgtttaaagtcatcattaagggggatgttatgtagataaccccttatgtgataagcattctcaatcatttttctgttgaaatgtggcagcaacatcattacaataagtaagaggaataggtgttaaattgattaaatataaagattgatccatttgttccaccaagaacaatctgggaggttttattcatggcaaagtacacaatcgtagacaaagatacatgtattgcatgcggcgcttgcggagctgctgcaccagacatttacgattacgatgatgaaggcatcgcgttcgtaacgcttgatgaaaacaaaggtgttgtcgaagttcctgaggtactggaagaagatatgattgacgcatttgaaggatgccctactgattccatcaaagtggcggatgagccatttgaaggcgacccgcttaaatttgaatagaagtaactaaaaaaagctcccgaacgggagctttttttagttaatggatatgtgcacttcgctgctgctcaatccatggcttaagcttgataaaaattagtgagaatacaaccgtaattacaataccttttatcatgttaaacggcaggatacctgcgacgactgctgtttttagcgcgctgtcggataatgccggtgaatgtaaaaaccatgtgtatgccggaagaattagaacataatttaaaatactcattaaaatggtcatcgctgcagttcccaaaagcaggctgacagccaagccctttgctgagttgagttttttaaataagaaagcagtcggtaatataaagagtgttcctgcaataaaattcgcaatttgccctacaggaactccggccatgcttccctgaatgatatactgaagaacattttttatcgcttctacggcaatacccgccaaaggtccgtaaatcagaatggcaataatagcgggaacgtcgctaaaatcgatttttaaataatccggaagacccggaaacgggaaatttaacagcatcaaaacaaatgcaatgctgctcagcatgctgaccacaactaatttttttactttcacttcattctctccttttcgatcacatcttactcgaaaacggaaaggttcttttccagccaataaaaaaaccgcttcatatataaaagcggggtttcgaaaattaggctaggcaaagaaacgtttgaaaaattcaatttcaaaacgcttatgaacctccatcttctcccatccagactgtactgtcggctccggaatctcaccgaatcctgctgtaaagacagctcgcgggcttagagccattggctcatcaccgccggtagggaatttcaccctgccccgaagattgatcatatgaaatttaattacattataaacgataactggttggctgtatagagaattgcttcaaattaaatatattacctgcaagctatcagatcattgatttattaggctttacttttatcctttactgcgtcaatacacgttgacactcttttgagaatatgttaaattatcagatatttagtttgtcaatttaggaggaaatctaacgatgtttcgagtattggtctcagacaaaatgagcaacgacggtttacagccacttattgaatcagactttattgaaatcgttcaaaaaaacgtagcagatgcagaagatgaattacatacttttgatgctcttttggtgcgaagcgcgacaaaagtaacagaagaccttttcaacaaaatgacttctttaaaaattgtcggaagagccggtgtcggtgtcgataatatcgatattgatgaggctacgaaacacggggtaatcgtgatcaatgctccgaacggcaacaccatttcgacagctgagcatacatttgcaatgatctcttctttaatgagacacattccgcaggctaatatctcagtgaaatccagagagtggaaccgcacagcttatgtcggttcagagctttatgggaaaacgcttggtattgtaggattaggccgaatcggaagtgaaattgcacagcgtgcgagagcgttcggtatgactgtgcacgtttttgatcctttcttaacggaagaaagagcgaaaaaaatcggcgtaaacagccgtacatttgaagaagtgcttgaaagtgcggatatcattaccgttcacacgcctttaacaaaagaaacaaaaggcttattgaataaagaaacgattgcaaaaacgaaaaaaggcgttcgcttaattaactgtgcgcgaggcggaattatcgatgaagcagcacttctcgaagctttggaaaacgggcatgttgcgggagcagcgcttgacgttttcgaagtcgaaccgccagttgacaacaaacttgttgatcatccattagtcattgccactcctcacttgggagcatcaacgaaagaagcacagctcaatgtcgctgcccaagtgtcagaagaagttctgcagttcgcaaaaggcctgcctgtcatgtcagctatcaacctgcctgccatgacaaaagatgaatttgctaaaattaagccttaccatcaaattgcaggaaaaattggcagccttgtatcacagtgcatgaaagaaccagtacaggatgttgccattcaatatgaaggcacaattgctaaacttgaaacatcgttcattacaaaagcccttctgtcaggctttttaaaaccgcgcgtagactctactgttaatgaggtcaatgccgggggtgtcgcaaaagaacgcggcatcagcttcagtgaaaaaatttcctcttctgaatctggatacgataactgcatcagcgtaaaagtgacaggagaccgcagcacctttactgtaacggctacgtatattcctcatttcggagaacgaattgtcgagatcaatggatttaatattgatttttatccgacaggtcacttggtgtatatccagcatcaagatacaacaggtgtcatcggccgagtaggacgtattctcggagataatgatattaacattgcaactatgcaggttggccgtaaggaaaaaggcggagaagccatcatgatgctttcctttgacagacatctggaagataaaattgtgaaagaactaacaaatgtccctgatattgtgtctgtgaagctcattgatctgccctaatcaaaaaaactcaagctatctatatagcttgagtttttttatttctatccccgtgtgtttttatgcaaaatatctaagacactccttagctcagaaacaggaatttggcctggtgcggacgcctcttctccagctccaaaagtacaagccgatccaaaaacctcaccgctcagcctgctgatgagccctgttgcagccattgacattgtaataatggggcggtctgcatattttgttttcattgtatacgtcgcatcaagcagtgttaggagatctccagtatcattcggcatgacagccatttttggaatatgcgcgcctaagtcctgcatttttcgaagtctggaaataatttcatcttttacaggtgttttttcaaagtcgtgatttgacatcaccacatagacgttgttttcttccgccagcgatactaacgcctttacatttgcatctcctgaaaataattcgatgtctatcagatcgatgtcttttgtttggattgccgattctagcaaagcaagataggaactttcgtccatctccatgctcccgccctctttgtgggttctgaatgtaaatagaaatagcttgtcttctaaagatttacgaagcttagaaatgagctttgtgaccgcttctctgtcattcgctttttcaaatacgtcgactctccattcaacaatgtccggattcagtaattttactgcctctgcttcattcagaatttgtttttccgtctttcccatcagcggaacgatgattttcggcattccttccccgatggaaactcctttaattgttaacacgttcactcatctcaaatcctttcaatcgttaccttgttttattatacacgtacaacttttttttgaaaatttctattatatgaatagcaactaaaaaagagcctcaaagggcccattttagtttaagaaaatcggatttggagcagccggtaccggaattgcatctgatacgtcatatttgccgattttgtttgttctggtttcggtaaaggtcacttctgtgaagccaaactcttttgcggttaaaagaagtccctcaatcattaaaatactggcaatagaatcctcaacttctgagtcctttgagaaacggatatataagtgcttctgtttcttcgttacagattggacagtacccgcttgaataagcggtgttgtatctttttgactgctcgattccatttccttaatcgcttcttttactgtatcaaaagaatgatttgacggaacgagaaagtcttgtccttgtttattttggtacaagtagtaggatcgttttgactgtttgggaatcgaaatttccgtaaaagtgccatatgagccaatccgaaccccagtctcattttgatccgataaaaatttgactttttcataaggactccattttaaggattctttaagcaatttttttaacagtgtatcatcttttacagaaaatgccgtagctggctgatggactcgtatacttaattccttctgctttggtttttcttttatttctacttcatctatgaaggatggaattgtaatggcatgatccaagatatccaattcactacttacagtcagcatgtcctggatcgtttggtatgcatttgttttttgaatgctgacgggtataattgcagatgtatcggcatcagcaactgctacagtgatgtaattgtcttgttccttttcaggtacaacaaacgatgtatgatccagggatgatgcagcttttgggctgtcttctgtctcagttttcgttactgcgttctcttgggacgcttctttttgttgaggctgtgcctgatcaaagaaatgaggagaaataatgaaggcgatataaaccgcaattgcagcggcacacgcggggccaatccacctgacagcgggcttatttttacgctttgccatcgtcagccgcttgtaaatatcctgaggcgaacgatggtctttaactgccggaagttgacttaacaactcctttatctgttcttcgttccattctgacttcatcatccattagctcctccctcaaaagctccatatgtttccgaagtactttgagccctctgtgttgggtcgtttttactttgctttccgagaagcgcagagccttggctgtttcctgtattgaatatccctgaataaaccgcaagataatcacagctctttgatcgattgtacattgatcaagcgcagcataaatttcccggacattttcatgttgaacggcaagttcgtccggtagcaattgctgatccctgacatcctgtgtatcccagtcaaatgtaccgagtatacgctgtctgattgtttgctgtttacggaaccagtctatcgcaacatggcgtgcgatagacaatagccatgttttttcactgcttcttccttcaaacgtatgataagaatttaatacccggatataaacctcttgaagaaggtcttctgtctggtttttatcctttaccatataaaataaaaattggtacaaatcttgatgatatgtatcatataataattgaaaggtttcttccatttgaaacccctccgttcacttttttgtcgtatgaatagcttgaaaagttacattacaactatattacgagtaactggaatttggaagggaatttatattaacatatccttaaattttattaatgttggctattaaaaaaacacccgctcagtcagcgggtgtttcttatggaacaagattcttcggcaaattcagactcgattttaccgttttgtcggaatataaaaagtaaatgttgttcctttatctattcggctgtgcacagtgattgatccgttgtgggcttccacgatatttttaacgatagccagccctaacccggttcctgctctgccccttgtccgcgctttatctgccttataaaaccgctcaaagataaatggcagatcttcttccggtatgccggacccggagtctttgatatcaattttcaatccatccttcacagaatggactgaaatggagacactgccgccggctgaagtatgccgcagcgcgttatcaatcaaattggtaaatacctgctccatcttgtcttcatcaaacataaattcctcttctgtgagagaaatgtcatgatctaaagcaatatttttttctttcgcaacaccggaaaacttccggatgatcttttctaaaaactcattcacattgattttttcataatgtaagcctgtatggcctgattccattcgggctaaatcaagcaaatcattaactaaacggcccattcggagtgattcgtcataaatgatttgggcaatttctttccggtcttcttcagagcttgcaatgtcatcaacaattgcttcactgtatccctgaagcatggagatcggtgttctcagctcatgactgacatttgcgataaagtcctcccgcagcttatcaaggcggcgttcttctgtcatgtcacgcagtacggcaactgctcctctgacgtgcgattccgcataaagcggcgacatcaaaagcacccatgatctgccttgcagcgtcatctcaatcatttgttctttttcagtgctgacagcgttttgaaacagctcttttgcttcaggcggaaggttgtcgccttctttgatattcatgttctgttcataataccaagcctgaagaaaacgttcagccggcgggttggtcacaagaatcgtaccgtcaatattaatggtaataaccccgtcagccatactgctcaaaatgttagaaagctgctctttttcttgattgagcgcattgatatgaaagttaagctgccggcccatttgattaaaagcggtcgccagttcaccgatttcatcctgagttaaaatcgggatttttgtatcgaacttgcccttcgccaaatcctgcgcgccttctctcatttttcggagagggtacgtgaccctgcttgataaaaagaatgcgaaaaatgtggtcagcacaatcgcaattccagcggcaagaaaaatatagcgggtcgtatgttttgttgtatctttaacggcaagcaaagactgggataaaaagaccatgcctttctttccgtctttttcatacgggacacctacaatcaggcgttcattatccgtgtctgtatcgctcagtcccgtccgtttgcttacttttttatggtctttgagagctttatttaagtctttgtcatgctgtatttgctcaaccgtaatagacgacaggcgatttttatcattcggagaataccagtggttcttctcatcctggatgatggcaatgcttgttaagttatcagcgagttcccaagtgattgaccttgccagtgcctggtcctcgtgattttctaggatgacagcaactttattcgcaagctgtgttaaatcattctcagcttcttccacatggtagttttcaataaactccagcaaaagaaccgttaaaatgaacaatacgatcaagacgagtgaaaggatcgtaaaccacagcttgcctactacgcttttccaaaatttcattcagcgccgacctcaaatttataacctacaccccatactgtgacaatttttttcgcagcttccggagataccttgttcagcttctctctcaagcgtttgacgtgagtgtccactgtccgtaaatcaccaaaaaactcatattgccacacttctttcagaagcttttcccgatcatacaccttgtcaggcgttttcgctaagaaatatagaagctcatactcttttggcgtcaggctcacttctgttccatcagctgttacgcggtgagcatcatggtctattgacagatgtgaaaacacgagcacatttttcgtcggtgtattggcattgaaataagaggtttgggatgctcttctcaaaagggcctttacacgcagcacgacttctctcgggctgaacggcttaacaatataatcatctgttcccgcttcaaacccctgcacccggtttgcttcttctccttttgcggtcagcatgataatgggtgtcgcttttttttcacgaatttgccggcacacttcaattccatcagtccccggcatcatcagatcaagcaaaattaagtcataattggcttcaagccctttggcaatggcttcatcaccattttcagcttcatctatagcataattttcacgttcaagatacattcttaaaaggcggcgaattctggcttcgtcatcaactactaatatttttgtttcgttcgtttggtccatgttttccccctgctttccttctgttactttcattttatcaaatcgtgagaaagtttgagaactgtgtcgctttcaaaggactatgcataagaatgaagtccggcaagcacaagatttacgaatattaaattaaacataataatagcaaaaccgattacggccagccatgctgacttctcaccgtgccagcctcttgacagtcttaagtgcaagtaagcggcatagaacaaaaacgtgatcagcgcccatacttccttagggtcccagccccaaaatctggtccaggcgagctgagcccaaatcattgcaaagatcagcgcgccgagtgtaaagatcggaaatccgattgatacggccctgtacccaacctcatccaccagatcaagattgacgtttttcaccagcggatgtaatagagcgctgattctttttctgatgatcagacggagagccccatacaacacaagacctgctccaaatgaccaaatgacagtgttcacttttctgcctgagaaaagcgcgggaagatcaacaagcggttccattcttccttcggtcaaaagctctccctgatgcggaccgacaagcgcgggcatttcgtacaccatcacgtttttttctttacttttgtccacccagttaaactccgcttcatagcctgcaagacgaaatgctgatgtgattgcaataaaggcgacggttgtgaccaggataaacataatcgcttcaagccagaaggtctttttgcttggctttgtctggtctacatgcttcaaaagaaagatgacaccagcgacaaagctgatggcaagtatagcttgcccaagcgcggccgttgttacgtgaatatacagccagttactttggagcgaaggaattaaaggcgagatatctgtcggaaacatgctggcgtaggcaatcagcaataaagcaattgacagcgtaaacaggcctaatgaaggcaatctatagagaaaataaagaatgataaacgccaaaacaagcatcatgccaaaagcggtggtgaattcaaacatattgctgaccggcgcatggccgctggcagcccaccttgtgatgaaatatccaaggtggcagaaaaaaccgacaatagaaagggtgattccaatgttggcccatcggtttggcctgccctttttatctttattcccgcgtatggccccgccgaagattgggacagcgattaaatacacaagaaaggccgcataaagaaaatttccgctcagctctgccatgacatcactcccttttcgcctatttctgtgttttgattaattctttttggtccaccggttcagtcagtccggaatcagccaatataaatgctaaatccttcttcaggccaaaccagtttttattggtatgccccgctaccataactgcaccgtcctgtgagtgcagccaaattcttcgatgctgccagtacataccttgaataacaccgatcataaaaatggctccgccgacagcaagcacccagagtgtcagatcctttctgactgtaagtccagtaatgtttttcgtttcgacatggtcaaatttcagcttgtatttattattgcctgatccttcgatggtttcttggatggcgacaaagctcttttcgcctttcggtttgtccggcgttatgatattaaagacaaaagccggattgttagggatctttgtttttgtgctcggctctccgtcctgattaaagtagaagtctggcaggtagctggcgatttccaccttgtaaccgttgccaagatcatagaccgaatctggatccagaaggttgatcttcaggctcccaaaggatttttttgtttttttatcaatcagctggaacaccatttggtcaagctgattctctttgtaatccacctggtaaacggaaaaagaatcaaaacgcagcggctgattgacacggatgtcttcttctgttacttttttcagcttcggcttctcgccataaacaattttcccttctctcttgtagagtacggcatcggtttgaaagttctttgccactctaccgtccccgactctgtcaatggcatctgcaaatacctttttttccgttttgctgttataggtctctacgctgaattgattgtttttcaaataatatttcccgtctgtacccggaattgctgcggtttcgccttctctgacccaaagcgtctcatcgacatacatgccaggcacaaatctcagcatcgcaccaaccagaaagatgattaatccaatgtggttgacatacgggccccagcgggaaaagcgtcctttttcagcaagaatgctgccctctttttctctgattctataatgttttttctttaatagagcaactatcttttctttcgattccccgttcagtacagtaaccgtttcactgaacaagcgctgcctttttaaaaaagccgggctccttctgacgccttggttttttaacgctctgtacaacggaatgacccgatcaaggctgcaaatcacgagtgaaatgccgatcgaggcaatgagcagcaaataccaccaagaaccatataaatgatgaaaccctagcaaataataaagctggccgaacgtgccatactgctccttgtaataagtatcagcctgtgcgcccggaggcagataggcttcctggggaaaaatggtgccgaacgctgatgcggcaagggttatgacgataagccatattcccaccttaaccgaggaaaagaaattccaaattttgtcgataatcgttttgttataggtttgcgaacgtcttgcgcttccgtcatatctcatatcagcgagcggaggttgagtttcctgaagagctcttccgcacgattcgcataaaacggttccaaccgggtttatatgtccgcattcacatttgacttgcttcatcccgaagtctctccaggttttatgagattcatatattcgtgtatcatgctttctgtcatagtgccggtcaccaccttgacaacttttccttccggattgatcaaaaaggttgtcggaagcggagatacgtcataggcatcaagcacttggcgatctgtatccagaacaaccgggaaattgactccgtaggatttcataaaattatgtactgctatctttgactccccaacatttacagcgacaatttcaacaccttggcttttaaaatgcttatattggtttgccatataaggaaactcttttttgcacggttcacaccatgtaccccagaaattcaaaaaaacacctttcccttttaagtcactgagctcgatacgtttcccattcgtatcctcaaggacaaaattcggtgcgtcggacccttcggatatactctctttgccggcaaatacagcgttgtaaatggtatagccgagtgcgcagattaaaacgagaaggatgccggtccgaatgaataaacgcctttttttcttcattgtccactgcccccttccccctattgcagatccattcaattatatcattgcacgttcatttcacatttcttactttttgaaggttatgtgaaatttagaaagcgtttttaccgtgatccgccagtgctctgagcctttttacttcgtgaggcgtaagctctctggcatcgcccgtgtgcaggcctcgcaggtttaaaaacgcgtattcctcacgcttcagcttgattacctcatgtccgatcgcttcaaacatgcggcgcacctgtctgttgcgtccctcatggatcgtcagctgaataatgcttgtctgctttttcttatccaaagacagcagcttcgctttagcaggcgctgttttgccttcctccagcctaattccgcgctccaactttctgagcagctctttaggcgggattcctttcaccttcgccacgtatgttttgtctatttcatacttaggatgcattagcttattggcgaattcgccgtcattggttaaaagcaaaagaccgctcgtatcatagtccagacgcccaatcggataaatgcgctgcggaatatttttaaaaaagtccgtcaccactttgcgtcctttatcatcttgcgctgcggaaataacgcctcttggtttatataagagaaagtaaaccggctcttcgcgttcaacctttaacccgtttacctcaatctgatcagaaccggtgaccttaacacctagctctgttactactttgccattcacctttacttttccttctttaatcagctcttctgcctttctgcgcgacgcaactccggcatgagcaatcactttttgcagtctttccatgtctttcacctcaagtattatcttacttttttcaaccttaacaaacaagctttttcaaattcctatgccaaatctaaaaaaaacgccgttttcaggcgctcccaaataataacgtaacgatgatgatagatgcaactacgccgattaaatctgcaagaagtcccacctttaatgcatcacccatttttttaatgccgactgctccgaaatacacagtcagtacgtaaagcgttgtatctgtagatccctgcatgacggaagccagcctgccgataaaggaatcgggcccgtatactgcaattaaatcggtcgtcattccaagtgcggccgtaccggagatcgggcggatcagagcaagcggcactacttcagcagggatgccgatagcggagaaagccggttttaaaagatccattataaaatcaagcgcgcctgatgatctgaaaacagttatagcgacaagcattccgactaaataggggataatggaaaaggcaatttctatcccctctttcccgccttcgacaaacgattcatatgtgggaacctttttgatcgttccataaagaagaattccggcaataatgattggaatcatggctaaagacagccagttgatgatttccatccgctcaccttcccttctttttgcggcggtaataaaaataccgatcaatgataatggcaccgattccggaaataagcgttgccaaaatgcttggcccgacgatatctgtcggcgttttggaggaataagccattcggacagcgatcaccgttgtcgggatgagtgtgatgcaggacgtattaacagctaaaaaagtaatcatcgaccggcttgcttccgatcggtttccgttcagctttttcatttgttccattgctttaatgccaagcggagttgctgcatttccgaggccgaagaaattcgccataagattagataaaatatagcccatcgccgggtgatccggcggtatatcagggaacagtttagatataaaaggtctgcacatccggctgaaaatatccaaaagccctgactgctcggcgattttcattaagccaagccagaaaacaagcacgctcatcaatccaaatgagatcgtaatcgcttctttcgcacccttaaacacggcttcatttacatcttgcagagttccgttgcacatcgcaaaaacgagtccgatcacggttaaactgacccaaattatattgaccattttgctccgcctgccgcattcagaaagattgatttaaacgtttcaaaaaattgtttcttcggtttttgatgccgctcattttcataatagatcggcacttttgcgatggttgcatcgttgaacatgatctccatgtgccctacgatgtcagggattttcgaggcatctttttcccatgcttttttcggcttgagcagtgtggtattaatttttacattttctttttcctcttcggtcagtaaataggtgatatcacgtttgataaaagccttcgattcataaaatgtgcctttcagctttggaatatcccctttttttgcaattaaataggtttgataatgctcaaacacatagttaaacatcttcatatggtcatcccaatcattagggtcattaatggtgacggctatcaggtcaatgccgtcctttgaagccgtagagaccagtgtccgttttgcaagttttgtatagcctgtttttcctcctgtgctgtacggataaagcatggtcagcagtttgtttttgtttttccatacgctttccatcgtttccgctttgtatatttttgtgcctgaaatcttttgatagtctttcagcttcatagcatacttagttaaaatggccatgtcataggctgttgaataatgattttcatggtcgtccaatccgtgcgggttttgaaaacgggtgtttttcataccaagctgctcggctttttgattcatcatataaacaaacccatcgaggctcccaccgacatgctcagcaatcgcgacagcggcatcgtttcctgatcttagcatcaggccatacacaagatctttcagcttcactttttgaccttctgttaaataaatggcggagccttctgttctgacagcatttgccgaaaccgtcactgtttgatccattttgccggattcgatggcgaggacggcggtcataatttttgtgatgctcgcgatccgccttttttgatgctcatccttggcatataacactctgcctgacgcaccgtcaataatgatcgcgctttttgcactgacatctatagcagcatgtgctgtattcacatttacggttgcaataagaaaagaaatcatgatcacgaatactgcttttttgaaaatgcgcatgtttgctcacgtccttgtggtggtttgtacaagtttatgcgcatgtccatcagttatgaataacaattatatttctggaagcaaacataaaaaaactctccctgaaaaagggagagtaaacgttatctgattggcgccatgcttgatccggacgcttcgtaatgagccagctcttccctcatcttcagaaaggccgcgctcaacggcaataataattgctcaagcgacgcaggaacagcatgataaaactcaattgcgctgaccccggtataagacgcccggctattttcacaccacgtgtcttttttcggcataaagaactcttcaatgcattggtgatacacattataaagtgttttttccgctctggcttcctgaaaaggctcctgcatcaggagacgacggcacgcttctgcgcctccttcacaaaatactgccattcttctcagagtgctaagcacatcacagcagtatcctttttcaataggcaattcagcctgtaaggactcaagcgtcgtttgatttaggtaatcgttcacggtattgacaaccattgataagaattcgcctgttttttgagtctgcgctcgcacaatcgaatgtcccatttcgtttggtatcttcccctcatgtctttgtctctcacattttgcttctttcatgatagcttcttccttatatcttatgatgatgaaaaagcgcgattcattaaacttctattttatatcttcgaaggtttggttaaagttttcaaaaaataaatctgcttcttcttgaagaacgtcttcttccgcattttcaggcagcggcggaagctcgtccagcgttttcaggccgaattgttcaagaaaagtcggcgtagtaccgtataaaatggcccgccccggaccatcggcacgccctacttcacacaatagcgccttcgcgacaagactgtgtaaaatccgctctgattttactcctctgatttcttcaatttctgctctcgtaattggctgtttgtatgaaacaatggccagtacttctaaagatgcttgagaaaggccctttgacggcacttcaatcagttttttcaagtaaggcgcaaagtcttttttggtagagagcatgtacgtatctgcatactcaataagttcaatccctcgtgtatctccgcggtattcgtccgccacatccgccatgatcgtgttcagttcaggctcttcgatttcaagcactgttaacagctgcttttttgtaagcccttcatcgcctgccgcataaagaagggcttccacaatagctttccaattcacgatatcaagccccatgaatggattcactccccgtaatgtaaatatctgaaaaattgtgctcctgttcaatgaggaccagctgatttttcatcagctcaagaacagctagaaaggtcactactaaatgttctttttgttcatatggaaacagatccataaagttgattctcgttcctctagatttcaagctgtgcacgatttcgttcattctggcttcgattggtatgtcctgtcttgtaattgttgtttccatcggcctgtttatttttttgcgtttcagcactttttgaaaagctccgatcatatcatagaccgtgacagagagcttttgctcagactgttttacttcttttgcatattcactcaaatcactcggcggtttcgtgaacgatttttgtctttcttcttcccgttcttttaaatccttcgccgcatctttatattttcgatactcaatcagcttttcaatcagttcctcccgcggatcttcttcttcaagtaattcatcttcaaaaagctcctcctcttgcttcgggagcagcattctgcttttaatgctgagcagcgtggcagccataaccaaatactcgctggccatatcgagctcaagcacacgcatcgtatgtacatataataaatattgttcagtgatcttcgccacaggtatatcatatatgtcaatttcaagacgattgattaaatgaagcagcaggtccaatgggccctcaaacgtatcaattttcacttgatattcttccatcatctcaccattttcaagtatcactctcattgccggaaaaactggctaccctatagtataagccaccaaaaagctctcgtccaatactatttcatttcctgttttgaacaagtttgtacagaatattcaaaacacgagaggtgtttgctcggagcgcagaagcgggagaaaaagccttagcttctggttttcctttctaagaagcaatagaggccgagcgttcttttttccttttatcccttctatggtacactaaaagcacattaaaggaggaagcaccttgtatccgaaagcttatatagattatctcgttgagtttcacgcgacacgggattattttgaatgccatgaaatattagaagaatattggaaggaagatccgccaaagaaacgaaaacgctattgggtgggctttattcagcttgcagttgctttatatcatcacagaaggcagaatacagccggggcaaaaagactgatggcgaacagcatccggattcttcaagcagaacaccgggcagtcgaagacttagggcttgatcatggccgtttgctcgaacttatgcaatcggtttacgaacaaatcgaaaccggctctgcctataaaagcattatgctgccaatcaaagatgagaaactggaggaagcatgcaggatcgaatgcaggaaaaaaaagtatacatgggggcagcccagtgcactcaggaacatatttcttatcgacaaacatcgtttgcgggatcggactgacgtcatccgtgaacgtgaaaaagaaatagaacgcagaaaaaaaagcagagactgatcacagcctctgctcagcgtgtcgacaaaccctcgcattcgttgtcaagcctgtgcgttggtgctcacgaatgaaaacattcgctccgctccaatgctcagctttcctagacttcaagggttttcaatcgcgctgaaaggatgacaaaaacctaaaacaaaactgttttcggattttgtcatcaaactaaagcagaggctgatgacagcctctgcttaattattgtatgaaatgtcttgatcctgctgaccttgacaacgttcgaaaaagctctgcgttaattcatttggaaccagtacttgcgttttgaataaatgctttaaagcatccatcatctgttttccgattccttgatggcgatgagaaggattcacactgatatgccggatctcaacctcagaatcctttttttcgactccgattgctccgacgatatcctcgtcctctttccaaagaaagagctggcggtctgtatccgtttcgtagtccttaattgtctgctgaagctgcttaaggtctttttcattcggcataaacgaaagaagccccatcgcaatcttttcaaacgattttttataacgaattaacataaaaacccctctatatccaaaatgtccagtctgctattaacggatacgaataggtgatccgttttctcacattatatcattttcgccatatttttaaactgttttcagcaaattattcaaatgagcggtttaaatttgccatttcaatggcagaaacagcacaatctacacctttgttgcccgcttttgtgccggcacgctcgatagcctgttcgatgttttcagttgttacaattccaaagatgacaggtacaccagtagtgtttgctgcttgcgcgatgccttttgcagcttcattgcagacataatcgtaatgtgtcgtcgcgcctctgatgacagtgcccaatgtgataatagcatcatatttttttgtttccgccatttttttcgcagcaaacggtatttcaaatgcgcctggaacccaagccacatcaatgtcatttgtgtctacaccatgtctgagcagcgcatcttctgctccgctcagcagcttgctcgtaataaaatcattaaatcttcctactacgattccgattttaagacctgtaccaactaaatttccttgtatgatattcatatgattcccatccttttttgtgatatttgtgattagaaatgaagtaaatgacctagcttgttcattttggtttgcaaatattttttattgtgttctttcgcctccatttgaatcggcactctttctgaaatacttagtccgtagccttcaaggcctgcgatttttcgcggattattcgtcaaaagcttcatattccggacaccgaggtcgcgtaaaatttgtgctccgatgccatagttgcgaagatccggcaagaatccaagcgcctcattggcttctacggtgtcataaccttgttcctgaagcttataagcttttaatttattgattaaaccgatgcctcgtccttcttggcgcaagtacagaagcactccacggccttctgcggcaatttggttcagcgcggcgtgcagctgcggtccgcagtcacagcgatgagacccaaacacgtcacctgtgagacattctgagtgcacccggaccaataccggttcttctccgaacggcacctctcccatcacaaatgcgacatgctcttttccatctacctcatttgtgtatccataaaccttaaatgtcccaaaatcagtaggcagcgtaatgtcaacttcacgctcgacaagtgttgtcagattgtaacggtattgaatcaaatccttaatggtgatcatttttaattgatgctttttcgcaatttcaatgagctcaggcactctcgccatcgttccgtcttcattcataatttcacaaatgacgccggctcctggagatccgcaggcttcagcaagatcaacagcagcttctgtatggcccgctcttttcaggacacctccttttttcgcaatcagcggaaaaatgtgccccggacgctgaaaatcagatggcacggatgtgctgtccagcaatgcttgaacggtaaaagatctttcttgagcgctgatacctgtcttcgtttcacgatggtctatacttacggtaaatgcagtgtggtgagaatctgtattatgctccaccatagggtgaagatcaagcctgtctgcgatttcctcactgagcggcgtgcagatcagtcctctcccatgtgtcgccataaagttaatgacttccggcgttgcatgctcggcaagagccacaaagtctccttcattttctctgtcttcatcatctacaacgatgatgacttcgcctttttttaaagcgtccagtgcttcttctatcggatgaaacatgcaaatcttcctctctaaaagccgttttcgcttaagaaggcttttgtaatggtttgttgggtcttattttcattggctttatgcaaaaatcgatacatatattttccgatcatatcgcattcgatattcactttagagccgatcgttttttctgaaaagatcgtttcgctgatcgtatgcggtattaaggagatcgtcactgtgtcttctgtcaggccgaatatggttaagctcacgccatccacagtaattgatccctttaaaaccaatgtttttgttaatgacgggtccatttttaaatcatagtaaactgcgttgcttttctcttcaattcgtgtgatttccgcagttccgtcgacatggcctgagacgaaatggcctccgaaacggccgtttgccgccattgctctttccagatttactttgcttccttttgttaaatcattcagtgacgtagctttgactgtttcaggcataacatccactgtgaattgattttttgtaaaatcagtgaccgtcagacaaatgccgttcactgcaatgctgtcgccaagatgaacatcctctaaaatctttgagcatttaattgttaaggccattgaatgccctgcttttttcatggattcgattgtgcctgtttcttcgataattcctgtaaacatggtcaccatcctattcctttgtcggttttgccgtcagtttgatatcacggccgatttgggttatatcagtaaattgtaataaggggacatctttcattgattgaaaaccttcaccggagattaagctgggagcatgcgttcctccgattagtttaggggcaaaatagaagatgatttcttgaaaacagccttctttgacaaagcttccgtgaacagctgaaccgccttccacatacaccgacatgatgccttcttccgctaggatcttcaaaacatcaggaatttgaatgcgctcggtttcaagtgtaaatatgttcactccgaaagctgaaagccgttttttcttttcctcgtctgcgcgtgccgtcgtaaaaatccatgtcggcgctatttgatcgcaaatcactttagcgtcctcaggaatcgagagtacggtatcaagtatgacccgaaccggctgttttgttacattcggcagtctgcaggttaagcttggattgtcggctttcactgtgccaactccgactaaaatgctttggtgtgttttcctgtattgctgagcatcctgtcttgcagcctctgacgtgatccatttgctgtcacccgtgctggtagctatcttgccgtcaaggctggcagccgcttttagcgtgacgtacggaaggcctgtcctcataaagtgcagaaatttttcattcaggctctccgcctggtctgccaggatgccttcccttacctcaatgccggcttctttcatcatgctgatccctcttccagccacaagcggattaggatctctcatcgccacgaacactcttttgatgccagagttgataatcaattctgcacatggcggtgttttcccgtaatggctgcacggttcgagtgtaacgtaaatgtcggcaccctctgcatgtgctccagccatatggatggcatgaacttctgcatgagcttccccatattttaaatgggcgcccattccgacaatttgtccgtcctttacgacaacagcgccgacgagcggattggattcggtctgtccttcgccctgcttcgcaagatctaaggccagcttcatataatactcttccatttgtttccctcccctcttttgttatttaccgtcaaaaaagccccgaatttataaaaaattcggggctttaggtattttacgcaataggaaataacactatgcatttttgaaccatttgcatagcggttcatcatccttctcccatccagactttcactgtcggcttcagcttaaactgaatccaccgcgtgcttatgcacacgggtcacgggctctaaagcaaatgtgctttactaccgccggtcgggatttccaccctgccccgaaggatacaatctttattcatttgtccttattggctattatagcgatcctttttaaagtacgcaatgaaataaacttacaatttgagaaaaacaaaacatcacccttcgatccgaaaggtgatgttttgttaatcattcacttttgcaaccttgattaatccgtcgatccgctttgatttgctgaagtatgccttaatcttgtcaccttcttttatatcagataaatcctgatttaatttttttccgttgaagatgattttcgttccgttttctgctactccatgatactctgagccgtcaattttcgtcactttatattcctggatggtgtattcctcttcttccgaggacaaggtttgtccaattgctgtcggaacatccttcagctcaacgtcatttatgtacatataaccgcctgcaagtaaaagcaaaagcactaacagaatggtaatcttggtttttattcttcccatttctaaacctccagccaatatgaatctattcattcatatgagttattcctttttttcatgaataaaaaaccgtaaattctcgtaaattattaatataacgatgcataacgggaatatgtttcacatttctgcaaaaatttcttttctatagatatacgaatttatgttctgttttaaggggatgaccgcaaaaaagatataaaaaagcagcctctcgggaagctgcttgatcctaatttgttttgcgcatttcgttaaacgggtagaaaacaaactttgacgtacccgcaatttgttttttcgtgaagaggccaaggccgttacggctgtccatggaattgcgacgattgtcacccatcacaaaatacttgttatcaggcactttaaccgggccgaaatcatcggtcaaatggtcaaaaccgtcctgtttcgctctctttttattagccgccaaataaggttcgtccacctttttcccgttgatatagagctggtcatttttcatctcaaccgtatcgccgggaaggccgataatacgtttgacatagtgaacatcatctccgtttaacacgacgatgtctcctctatcaaactcgccgatgtatttgactgtcatattaacaaaaaccctttcacggttgtgaagtgtaggatacatagagtcaccatcaacgacatacggcgcaaaaataaagttgcggatgagcaaagcaagaacgacagcaatcacaattgcttttgcccattctaatattgactttttcttcgaaacattttctgatttcaactgatttcctccaataaacaacggtcttcaatttatgttatcacgaatcgaaaaaaaatcccattaggaccattgaagtgattttacaaactgttaatcttcatcttctacccacatcatgcctattttttcttgtcgatcataactaggcctgaaaatattgaaagaaatgaatcgcataattcagaagcgatggactcagaagaaagagagttctcatatgcaaaatctttagatcgtatataaagcatgaggttacgggcagtttgttcatttactgcattccattgatctcccagtccatgatacccatggcacttgacaaaacaattaacgtcatgaaggttactggaatgtttgcggcaacctatttcacaggtgataaccgcaccccgttttttgctttcataatatgtttaaaatcattcaagctcgaaaacatggatcagcctccaaaaaataaatccaatatattcccggcagttgaagactctttattataaaactctgaatatccgcagttcttacagtaaaccactagaaatcggttatgctgcacgtcaaacagctttgataatcccgtgccggttgtggctatttctttttgtccggcttcagtactgccgcattttatacagcctttgttgtccataccgcgatctccttttcattacatcacgtttgtttgatttattttactacaaaataccaatcccaatgaaccgtactactttaaagtttgcttaattttgatcccccgttctttacatactaattgggttcgtttctcagcttggtaaatcttctggagaaacggaaaagctccatgaccaaaacatttaaacccagccaaacaccgccgaaggcgcaacccgcagcaacatcactcggatactgctcattaacgcgtacacacgatcagcccgatgaggaataaaacgataatcatcaaaaaacgcaacagtttgcagacgagccttgtgagaatgacgaacaaaaagataagcacaaaaaccaaaaatgacaaatgccgttaacgtctgttcgctcgggaatggatataatacatgactttccaaaggagcgtgaacaggatgaagggaatgaaagagccgtctaattccctctccataaagctctcgcaccaacgactaggaaaaataagaaagagagttcgattttccggtcttgccctttgaatactgtccaaagaaaagttagaacaataactgctaacagaacatctctagacgcaaaagctttctgaattgcagctgggcccagtctatacccgatccaatacgacatgctcactcccgcacagctccccaatccggccgctaacatgcttagcacccagtttaacttttcttgaaacacgagaacaccggcaaactctcctggtccaagtaaagatagaaactctaacatcaagacaataaacaagacggcatatccgtactgttcgagcaaccccgtcaaaacttgcatgtcattctccttaaacttttttgttcttttatcattcccaatccactttttgtataatcagcacaatttcaccttcagtcgtccaacaacattgtctatggcgggatcttctctcctatactcgtcactcatacattcttttttgacataggaggagcaatagcatgaaatgggaggaaacaaaagatacacagggagtttgccaaaattttgggcagttcgttctgccaccgagtcaggtgtttgtttgcctacctcattccttggccattccccattttccccgtttgaggttcgcaatgataaagtatttcacttagtttcgtacatgaagaggtaaattctttgctcaccgaactatgatagctgcgcatgatgattactgcattgcataaccactggttatttagtgagccgtgagcaatgtatatgcactttgagtcagcacaggatgatcctattacattcgccagaaaagcagctgccgcattcagagtagttaaaagaatagacagatagctgggcttccggaaggaggcgcttttttcgagcatttttataaatcaataaaaataggcatcttctaaatatttttgccgataagtttacgctaatcaactctagcactaatacatataaacaatagaatgatatgaaaggagacttaatagtatgattgattatcctattaatataaacaacgtttccgggaacagtgtaattaacgtaggcggcgcttttatgatcaggcctttaactttgtccaaatctgtgtttggctccggaggtttaaatacaggaattgtctttgaaaataactttgtaagcaaggctaaaatgattaatcatcaatttactgatcaaaacgtcaccaaaactttttaatctattcattacgggggcttgcgatgtctcactaactaaacacctggttttgccaaccgccatcagcactcggcggttttttattgaacatttttacccaataaaaaagctccctctatatgaggaagccttttgcctgccaattagccttctacgcgaacttctttcatgacatcgccgttagacatgtttttcgcgaattctaatccgcttgttactttaccgaatacagtgtgaacaccgttcaaatgaggctgtggctcatgaacgatgaaaaattggctgccgccagtgtcttttccggcatgtgccatagaaagtgcgcccgcctcatgtgtatgcgggtttccttctgtttcacatttgattgtgtatcccggaccgccagtaccagttccgtgcgggcagccgccttggctgacgaagccaggaatcactcggtggaatgtaagcccgtcataaaagccttcgttcgcaagcttttcaaagtttgcaacagttccaggtgcagcttcaggataaagttcaaattcgattttgttcccgtcttctaataaaaagtaacctgttttcaattgtatgcctactttctttattttaattttcaaaggagattatgtatgataggttatagcctgtctctccttgtcgcggctattataccacacctttcgggggaaaacgaatctcccgggctttactaaaaaataaaaatgaaacctgaatctctttatctccgtctaacctaacggaactgtatttttcatgattcaggtcctcacaaagcagcactatccagctgcttgtgaaattgaaggaggtcaaactgctttgaagaaaatttggattggaatgctggcagcggccgttttgctgctgacggttccgaaggtcagtctcgcggatgccgcagttggagatgtcattgtaacactgggtgctgatttgtcagaatccgacaaacaaaaagtgcttgatgaaatgaatgtccctgataatgccacaacggtaaccgtgaccaataaggaagaacatgaatatttaggaaaatatatatcgaacgcgcaaatcggatcgagagcgatttcttcatcgtcaatcaccattgccaaaaaaggctccggattgaatgttgagacccataatatcagcggcatcacagatgaaatgtacctgaatgcactgatgacagccggtgttaaagatgcgaaggtgtatgttacagcaccgtttgaagtatccgggactgcggctttaactggattgattaaggcgtatgaagtttcttcagacgaagcgatctcggaggatgttaaacaagtcgccaaccaagagcttgtcacgacatcagagcttggagacaaaatcggtaacgaaaatgcatcagccctgattgcaaaaatcaaagaagagtttgctaaaaacggggtgcctgataataaagctgacatcgaaaaacaagtggacgacgcagcttctgatttaaatgtcacgcttacagacagccaaaagaatcagcttgtctccctattcaataagatgaaaaatgctgacattgactggggacaggtcagtgaccagcttgataaagcgaaagataagattacgaaattcatagaatcagatgaaggcaaaaacttcatccagaaagtcattgatttcttcgtatctatctggaatgcgattgtatctatattcaaataggaaaagcgccgaaaaatcggcgctttcttttattgctttacacccgttttaaatggcagatcaagttttacaatatcttcgtatgtttctcgcttcacgactaaatgagcctcaccgttttcgacaaatacaacggcgggtctcggaatacggttataattgttggccatgctgtatccataagcgcctgtacaaaaaacggcaagaagatcgccttcttttacttccggcaggtcaatatcccaaatcagcatatctccgctttcacagcactttccggcaattgataccgttttgtcatgcgcttctccgatcctgttggctgccgcagcttcatatttagcttggtaaagcgcaggacgaatattgtcgttcatgcctccgtctacagccacatattggcggacacccggcacttctttttgagagccaatcgtataaagagttgtgcctgcgtctcctacgagagaacggcccggttcgatccaaatttccgggatgtcaaaaccgtaacgggaagcattttctttcacagcttcgataattttttcaacgtattcagtggcatgaagcggttcatcatcttccgtataacgaatgccgaaacctcctccaagattcagcaccttggatacaaatgaatatgaatctctccattcgtctagttttttgaagattttttccgctgctaacacaaaaccggccgtatcaaagatttgcgagccgatatggcaatggacacccagcagctgaatgtgttccgattgtaatacttgttcaatggcccgttcagtttgtccgttatgaagatcgaaaccaaactttgaatcttcctggcccgttgtaatgtagtcatgcgtatgcgcttctactccgggcgtgatccgaagaagaacatcgatggagtgacccgtttctttacataggtcttcaagaagcgcaatttcatagaaattatccaccacaatgcagccgatgcggtgctcaagcgccatgcgcagttcttccctgctcttattgtttccatgaaagtggatgcgttctgccggaaagcctgccgcaacagccgtatatagctctcctccggatacgacatctaaagaaagtccctcttcctcagcgagctgaatcattgcgactgatgagaatgctttgctcgcatatgccacctgtgctttcagccctgcagaaataaacgcctgtttaaagcttttagcacgctcacgtattaaagccacatcatatacgtaaagaggtgtaccatatttctccgctaaatagagagcatccacacctccgatttctaaatgaccatgttgattttgtctgcttgtgccgtgtaagaacaatgtcattccctctttctccgcttatggatgaaaggacagttttatggactgtcccttcataattaagacatacattatcatactcttcagtcagtttcaatgcgattatgaattggtaggctgtcttaagcgatttttggggtgaacgatactgggtcttacttttgcgccaggtttcgctgtgcggacaagaacctgccacagcgcctttccgttaaagggaatcagcggccataagtacggtgtctgaagggatttgatgcttgtcatggcaataattagcactgtaaatccgatgacgagcccttttatatgaaataaagcaacgagtatcatgaggacaagacggctcattttgtttgccaagcttaattcataactaggcgtcgtaaaggttccaatcgccgcaagtgagacgtacagaatcacctcaggagaaaaaaggccgacctcaatcgcaatctgcccgatcagaacagcggcaattaaacccattgctgtcgataaagccgtcggtgtgtgaatggcagccattctgagaaactcgattcctaagtcagctaaaaatatctgcaggatgatcgggatatgcgtatctttatttaaaccgataaatttcatgttgtccgggagcagatcaggctgaagcacaaagagaaaccagatcggaagaaataaagtagaagcaagaataccgaaaaatcttacccatcttaaaaaggtcccgactgaaggcgcctgcctatattcttcagcatgctgcacatggtgaaataaagtcgtcggggtaatgatcacactcggcgatgtgtccactataatgataacatggccttctagaacatgatttgcggccacatccggtctttctgtatagcgcacgagcggaaaaggattatagctttgattaacaatgaattcctcgacagttttgtctgccattgttaatccatcgacatcaatggatgcaatttctttttctacgatctcaaccagatccggatcagctatatcttctatataacaaatgcttaaatccgtctttgaccgctcaccaactttcgtcatcttgactcgaaggcgttcgtctctgatccgccttctgagaagggccgtattgacgacgatattttcaacaaatccgtctctggctcccctgactaccttttccgtatcaggttcttccgggtttctgcccggatagcttctgacgtcaattataaatgcgaaacctgcaccttcaacaatgacagcgacgagcccggacagcacttggtcggtggtttcatccaatgtttttactttttcgacctgggcgttcagcagcctgttttcgacgatgtcgaccagctcatcagggtcttctttccgattgttaatggcaacaagttctctcattaaatgaataatataggctgtatcgcataatccatttagatagtaaagctggatctctttatctaaaatcgtgagcttgcgaacacctacatcatagctcgtccccatcccgacacggtttttgaaatactcttcatttttagctggattccgataaacccgaattttctcttccttgtggtccggcatgatacccgctcctttctaaaataaactcgaccgctttcatggtgattggcgacccttttgagatatcgtcttttctgcccattttgccgatatccccgataccaacaataagcgggagatcaagtttatcaaggcaatagactgtatctccactcattctgtggtcatcaaattccctttccccgactttatcgacgccgtattcagttatttctccattgcggtcaatgcttacatcgaccctggtccattcagcctgatgtgtttttgacgcgaccgcaatcacaccgagcacttcaatagacggatgggttgcgacataggtcagagcggcttctcccggaccctctccttgaaggccggagtcgtcaaacatgacaaatacaggatcatacggtgctgaggcgatcagcttgacaagctcggcgccgctgcgggtggaaggattcccttttgattgtgaaatacatcgacctcccactttgcttgcggcgtattcaattgttttagcggcataaacatccccgtctgttaccagtatgaccttgcgttttgtcgtcatgtcggcattatcctttcggtttgaaaataacagctacgataaaggcgaaaagaatagcggctgagataccggccgaggtcagctcaaaaatccccatgccgattcctataaatccgtgtatatgcgcctgatgcatagcaccgtgcagaagactgtgaccgaagctgacgatcggaacggtggcgcctcctccggcaaattcaataaatttatcgtaaatgccgaaaccatctaatattgcaccgattacaacaaatgatgtcatgacatgagctggcgtcaatttaaaaatatccaagagcagctggccgacgatacaaatggccccgccgcatacaaaagccaaaaggtagtccatgttaagatgcacctcctgcacgctcaaatacaaccccgtgggcgatagtcgggatggtttctttttgctggatcatcgtcgggcttaacagcgccccggtcgccacgacaaatacacggtttaattttccttctctcagctgcttaaaaatatgagagtaggtgacaaccgctgaacaagcacagccactcccccggcaaagacctgctgatccggagtgtaaatcagaagcccgcaatcatcatgctttgtgccgactggatatccatcttcttttaagatgtcttttacgattggagaaccgacgcctgacaggtcacctgtcaggattagatcatagtcatccgctgtccggttgagatctttaaagtgctgcttaatcgtatcagctgcagccggagccatagccgatcccatatcaaaaggatctgtaatccctaaatcagaaacctttccgacagtcgcacttgtgatttggatatcacccggtgtctgactgatgacaactgcaccgcttccggttacagtggaggtagcagtgtccggtttttggcctccgtattctgtcggatagcgaaactgtctttccgcagttgcattgtgactgctggtggcagcaagtgcccttttggcaaacccgccatcaactaaggctgatgcgacagccactgtttccattgatgttgaacaggcgccaaacatacaaagaaatgggattttcaagtgtcttgccacatagttagccgtcacgttttggttcagcaagtcgcctgccagcaataggtcaatatcatcttttgtcagattgtttttttgaagcgcaacattaacagcgtcttccatcagctggcgttccgccatttcccagcttttttgattacaatgcatttcgtcataggttttatcaaataacgagccgagcggtccgtctttttcctttggtcctgctgccgttcccgctgagttgacaaatatgggatgttcaaatacccaggtttgctttcctgttaatttcattttcttctcctcctatgacatcagtttctcaaaagcaaaccgaatcattccaacgatgtatgcagctacaactccgaaaacaataacatttcctgccagtttaaacatatttgtcgctactccaagcactaatccttcacttttatattcaagagccgcgcttgccatactgttggcaaaacctgtgacaggtacggctgaacctgcgcctgcgaattgtccgattctgtcatagatgccgaaccctgtaagcagggcggaaattaatatcagcgttgcagctgttggattccccgcagttttttcattgaaatcaaaaaaatgaatataaaaattttgcagaccttgcccgattgcacaaatcagtccgcccactaaaaaggcttttacacagttccagacgtaaggcggcttaggctgatatgttttcacttttgatttgtaattttcttttatgtttgtcatcttgaaacctccttatgaatggtcaataaagtacagccaatgaaataaggatcccgcgattttcccaatcacgatggccattaacagaataatgattttacttctgagcccgattcgttttgccaaaatcggcaggacatttaaaacctctgtaagagcagccgctagcatcccgacgaacaaacctgccagaagcccgaccggcacagctatccattttgttagataaagatgattcatatgaagcgtctcccatcccccgcaaaccgcgccaagaataacagccgcttcataagcctgaacaaatctcattgttttggtgagctgcatcagccgcggaatgattcccattacggttaaaaaagcaacgaaacccgcccccaccgttatgcctccgccgagcccgacaaaaataatgaacaatacactaacgatcatgcagatcctttatggtttcttgattctcatgcatggccacatattgatcgagatcaagctgatagttaaacatctcaacctccagcgggctgggctcttcatttaggcgctttttaaatatgtggttaaaaaacacgatcatccccagtcccaaaccgatgctgtatgggatttgaagcaaatatggatagtcattcctctctccggttatgatttcatatagtgcgatatgaacatctctcatgcttacatcctcatgaaagttcatgatggcaagacacgatccaataaacagaagcagccagacaccgataaatagaaccgttgataaatttcgctttcgatattgaatttcaacaatggtttctgctccgcctacggtttgaacatcaagtgtcggatcttgtaaatgaatggctctgaggacttgtatgatatccagaattacgatatttttatctttttcgctcacctgataaagcggcatagccgaaagtttctttttcagctgaagctgcccttctatttgcgcggcatctccaacggtaataatatcccctggatgtgccagcacccggtggcgaagccggataaatattcgtcgttccatcattgatcaccatctttcggtggttatatatgtagtatgtggttcgattttgttctcattcatccgctcgaaaagaccataaattaccacgcttttgcacataaaaaagctagcctgcactgcagactagccatccgtatgatccatttgaaccttgatctgttttaatattttcttttcaagcctggaaacctgcacctgagagatcccgagccgctcagccacctcggactgtgtctggtctttataatatctgagatagacgattagtttttccctttcctccaaatcgctgattgcttctttcagcgcaattttgtcaaaccatttttcttctgagttgtcagcgatttgatcaagcagggtaatcggatctccgtcattttcataaacggtttcgtgaatcgaagatggagcccttaccgcctcttgggccagtacaacatcctcagcttcaatctccaaatggtcagcgatctcctgcaccgtcggcactctgcccagtgttttcgaaagctcatccttcgcgcgccggattttgtttccaagctcttttaatgatcgtgatacctttacagttccgtcatcacggataaatcgctggatttctccgataatcatcggcactgcatacgttgaaaaacgcacatcataggttaaatcaaatttgtcaacagattttaacagcccgatgcagccgatctggaagagatcgtcaggctcatatcctctgtttaaaaaccgctgtacgacagaccaaacaagacgcatgtttttttctatgaggaggtctcttgcctgctggtcgccattttggctttgtttgattaattcctttacttcatgatccttcagctgagcgtttttgccgtttttcttaacctccacatccataacaaatctccttaattacaaagcgctttgctttttgataagtgctttgttaagcgaatcgttgttcccatttcaggcgatgaatcgatactgacatcatccatgaaattttccataatggtaaagcccattccagagcgctcaagctcaggcttagtcgtaaatagaggctgacgggcttcttcaagatctgtaatgcctaagccttcatcacgaatagtcatatatacgacatgatcttccagcgtcactgaaatgtaaactttcccttcacagttctcttcatatccatggataattgcatttgtgactgcctctgacacgactgttttgatttcagtcagttcatccattgtcgggtccagctgagctataaatgaagcaactgtcacacgggcgaacgattcattctgactgagggcagaaaactcaaggtgcatttcatttttcatgatgccacccccagtgtcaggagcgcctgctgttcagattgttcaaatcggataattttaaacagacccgacatatcaaacaatcgcttcaccgcaggagagatagcgcaaacaaccatttctccgccaatttgcttaatttgcttgtatcttcctaaaataacgccaagccccgagctgtccataaaggaaaggtcctccaagttcagcacgatatggcgaatatcatccttctccaatgattgagtcactttttgcttcagggtttcagccgtatggtgatcgagttcgcctgttaatcgaatacaaagcacagattctttgacattcatgtcaattccaaggctcatgctcattcctccttgatatgatcggataatgagtgtttcgatttcgacggaatgaattccttcaccgtgacaaaactagtggtcattcggcataattacttaaattttgtccagtctcccatcgtccgctttaagaatgtgataaacccggctttcttcatatcttcttttgcagcaacaggactttcagcgagtacttctccatcctttttcagaacaagagtgccaagctcttggcctttttgaatcggagcactaatattgtccttcatcttgatttcttttttcacatcgttcatatcctcgccttttttcgtcaatattgaaatcggctcagatgtagtgagttcgatcaatttttgtttcccttttttgacctttacttttgctactgtttgatttcgtttatataaaggatgcgtttcatattgactaaaggcgaagtcaagcatttttgtcacttgcgcgtttctttctttaggcgtgctcgctccgaatacaaccgctatggcccgcatgtttccttttttagccgaagcagtcagacaatatttcgcttcgcctgtatagcctgtttttacgccgtctacaccaggataaaatttgataaggcgatttgtatttacaagccaaaactttttatctgtattttcacgcagataatcttcatacgtgccggtaaacttcgtaattgattcgtatttcaataattccttagccatgattgccatgtcataagcagagctgtagtgtccttcctcggtcagtcctgttgggtttttaaaggatgtatttttcaatcccagctcttttgcttttttgttcattttcttcacaaattcttcttcagagccggaaataaattcagccatggcgacggaagcgtcatttcccgaagcgattgcgatgcctttcagcatttctttgacagtcatttcttcgccgggctcaaggaatatctgtgagccgcccattgacgccgcatgctcgcttgtacggactttatcactcattttgattttgcctttatctaaagcttccataatcaaaagcatcgtcataattttcgtcatgcttgcaggcgccagtctctcattgctgttcttgttgtaaagcacttttcctgtgtcacgttctatcagcaccgcagacttcgcttcatgagcaagctccgatgtacgttttccgtcttgttttgcaaatgcagacggtgcaaatgtaagcagcattataccaatcaacaaagtggataaaagacgtttcatctcaaaagccctccatttcataatcctttttattttttccaagcgggatggttttatacgccactgatggaaaatgtttcgaattttgggcgtaaaaaaagacagctgtgtgatatcagacacagctgtcttttggtcctgcattgattcatttttattcgtactgagcgacgatcgctttaacaagctttaagaatccagcttttactttttcggtcacttccataacttcatcgtgacttaaaggctgatccagaattccggctgccgcgttagagatgcaggaaatgccaagaacccgcattcccgcatgattcgctacaatgacttccggaacagtagacatgccgactgcatcagagcccatcgttcttaagaaccggacttctgccggtgtttcgtaagaaggtcctgtcacagcagtgtacacgcctttttgaattgggatattaaggtctttcgcaatcttttcagccaggctggacagatctttgtcataggctgaagacatatctggaaatctggcgccgaaatctgcttcgtttggcccgattaacgggtttgttcccataaagttgatatgatcggtaataatcattaagtctcccgcacggaattcagtgttgacaccgcctgcggcatttgtcacgatcaacgcttccacaccgagcgctttcatcacgcgtacagggaatgtgactttctccattgagtagccttcataaaaatgaaagcggccctgcattgcaatgacggaaactccttcaagagtgccaagcacaagctgtccggcatgcccttcaacagtagataccgggaattcaggtatatcttcatatttcagcttgaccggattttcaatttcgtccgccaaaatgccaagacctgagcctaaaataaggccgatcttcggagattccggcaggttttgtttaataaaagcggctgcgcgttcaattctgtccttcaagaaacagtccccctattgtaataaagataaaaagcttttcccgtatttcggtttattcgtttggaaattatcagcgatcgttgcaccgatatcagcaaatgtatctgcaagcggcagcatttgcgctttcttatgttttttgctgtaagcgagaatcggcacatactcgcgtgtatggtcagtcccatgatgaatcggatcattgccgtggtcggctgtaataattaacagatcgtcttctctcattttttcaaacacttccggaagccgcgcatcaaattcttcaagcgcgcgtccgtagccttcagggtcacggcggtgtccgaataacgcgtcaaaatcaacaaggttcgcaaagctcagacccgtaaagtcttctcccagcgtatcgatcaccttgtccattccgtccatattagaaaccgttctgcgtgaagaagtaatgccttctccgtcgtaaatatcagagatttttccgattgaaatcacatctaagccgctgtctttcaattcattcatgacagtgcgatcaaacggcttcagcgcataatcatggcggtttggcgtccgtttgaattgacccggctctccgacgaacggccgtgcaataatgcggccaaccatatatttcggatcaagcgtcagttctctcgccgtttcgcaaatgcgatacagctcctcaagcggcacaacctcttcgtgagcggcaatttgcagaacagagtcagcagacgtgtaaacaattaaagcccctgtctccatgtgctcctggccaagctcatccaaaatcgctgtgccggaagccggcttgtttccaataattttgcggccagatctcttttccagctcttgaagcaattcatcaggaaagccttccgggaacactttaaacggtttatcaatgtataaacccataatctcccaatggccggtcatcgtatctttgccgtttgacgcttcttgcatttttccataataggcaagcggatgttctgttttttctacacctttgatatcttcgataagaccaaggccgagctttgccatattcggcatatgtaatccgttcatatgctcggcaatatgaccgagcgtatgagcgccttcgtcattaaagtcagcggcatccggcgcttcgccgattccgactgagtccatcacaattaaaaacacacgattatatttgtatgcaggcatcttgaaagcctcctttttttctatacgtctattgtatcgctaagaggtctgacaactcaagtataaaccgttttcattcccgttgacaatgtatttggaaataatgagaaacttcaatattttctgtcgctctaaacaaaaaagccgcagccacctgcggctatgctcgcggatgaaactgcttgtacacatccttcagccttgttttcgtcacatgcgtataaatttgcgtcgtggatatatccgcatgcccgagcatttcctgcaccgctcttaaatctgccccgttctcaagcagatgcgtcgcaaaggaatgcctgagcgtatgcggagtcagctctttcttaatgccggcttccaacgcgatttttttcaggttcttccaaaatccctggcggctgatctgtttgccgtgatgatttaaaaagagggcgtcagacacattgttctttaacagttttcccctggcttttgtcatatattcctcaatggcggaagcggcggcttcaccaattggcacaatccgttcttttcttcctttgccaaagcatcggataaaccccatagataaatgaacatctgccgttttcaactcaatcatttcactgactcgtatgcctgtcgcataaagcagctccagcattgctttatcccgatagccgaatgggctcgtcagcttaggcgtgtccaataaccgctcgacttcattgagtgcgagcaccttcggaagcgcccgttccgtcttttgtgtttcgatatgaacggaagggtccttatccgttactttttccctgagcagaaattgatgaaaagagcgaatggatgccaaatgccgcgccgatgtcttaccggatttccccgagtccttcaaatactttaagtattggataatatgtatgcgggtaacgtggttccaatccgtcacatgaagggtttctgttaagtagagagaatagcttttcaagtcacgttcataggatacgatcgtattttgagagagccctctctctaccatgacgtagtggatgaaatcctttatttgatctttcactcttgatctactccccgttttggtaaaaaaagatcaaccggtcgagccatccgcctttttcatcctgatccatttcaacaacttttacagcggagccttccggtttatcataccgatgatagttttcatactcttgattcacccatatcatagcataatagaacaaagcggtaaaaccggtaaacaggatgaaaactttcaatgcatcgacagctgttttcaggaatcttcccatgtcctaatcgatcctttcctatggttccagttatataaaccatatgccaaatcagaaaggttttatacatagaaacagcaaaaaaccctttccccatgagaaaaggttcgcgctcggcaccatctattcagtttcttttccattacagcggtggcaaatgccgtgaaacgtcaatctatgatctttaatcttaaatttccaatcacgttcaatgatttcttccacgtcttcaagcaaatcttcttcaatttcatcaacggctccgcactccatgcacaccaagtggtgatgaaagtgagctgcgccctctttccgaaggtcgtaacgggacacgccgtctccaaagttaattttatctacgacttttaattcagttaataattcaagcgtacggtatactgtagcgagaccgatctcaggagatttctcttttacgaggaggtatacatcttctgcgcttaaatggtcttcttcgttttcaagcagcactcttactgtcgcttcacgctgtggcgtaagtttatagctggatgagtgcagttgtttcttaattcgatcaatacggttttccatgtctttccctcctacgccgcattccatgactcattataacaaaatacgcgcagagttccaactataattattataaactgataaataaaacggttttcttttaataataattttaaaaaagtctagatgtaagcttttccattaaaacaggagataagtatgcttcaaacagagatgagatcagcgctaaaaacagaatgaccagcagcacaaaggcataccgcccgaaccattgaatcggcgcgtcatgcaggcttcgtttcacgaacagctgtctgattaactttaaagaaaacgcaattgcacatgtgcccataatgagataagccggaatcagcagcacattttgcggcaaaacggcgacaaatgataggaaaaacccgcttactcccatctgattgactaggaacccgacagtaaagccgacgacgatccctttcagaaagatcataatgaaaataatcggcatcccaatgacggaaattccgagtatccacatcaggcctaaatactttgcattatgaaagatactttgcccaaacatatcagctgaacttgcctgttttccatccgaaagctgtccaaaaaattgacttaagtagtagtataaatcttctttctggctgatggtcatactgttgacaataatcgcgccaaagatgacacccatgaaaaacagcactgacacaaatatataaagagagagatgatctttgacatgcctgagaaacatgtccttataagagatttttcgcataccgtttcctcccgcccgttctagtgatttgatttaatagattgtatgaaagaaacggaaaaacatgccctttttcaaaaagaaacgatagagatgaatgctaggcggctttttggggcacaaaaaaatccttatcatcaactgctgtatgatcataaggattcttatgcttccgtttattcaaaatctcttttttgctttttgtcattctttcatgtgtgctgaaagatggtgtgctgcctcttgataataagacgtcacgtccgccgtttctcaatcgatgcccccgcttctttttcgcttggctttttgccatgtgatcactcccttttttattttcatagtaatgataacaaaattgaacaatgataagaaaaaaacagcacctgctacgacaggtgctgtttagctacatttatttcactgctgtaagagctgcatgctcgacagctgctgctaccgcatgatggacttttgaatcaagcggctgagggacaacatcaccttgtttagtgcaagctgcgatggcctctgctgctgcgacaagcatatcatgattaatctccgtgctttttgcgttaagcgctcctctaaaaatccccggaaaaccgagtacattattaacagaacgcccgtcagctgcatatgcggcgccagcctgcagcgcggcctccggttcaatttccggcttcggattcgataaagccaaaatcacttgaccagaacgtacaaatgccggttttattaaacccggaacgcccgttgtagcaatgacaatatcacatgtttccatgagctcctcaatactggaaactgcctgtccgccgtattgttcgagacgattcattgctgactctgatttgtctgttccgtacacagcattcacaccataagccatgaacatccggcagatggccacgcctgctgcgccaaggccgatttgccccactttcgcttccttcaggtcaacccccgcactcctgcatgccgaaatggcagctgccagcgtcactacagctgtaccatgctggtcatcgtgcataacagggatgttcagctcctcttttaggcgatcctcgatttcaaaacaatgcggcgaaccgatatcctcaagaaggatgccgctaaagcccggagaaatatgttttactgttttgatgatttcttcaggatcactcgtatcaagcagtatcggaatgccgctaatacccgccagctgatcaaacaaagcagcctttccttccatgacaggcatgccagccacagagccgatattcccaaggcctaaaattgcggttccatccgttacaattgcaacagaattgctgatcgttgtataaatagaagctttttcaggttctttttcgatcagtcggcacacgtccgcaacacctggtgtgtagacacgtcccagctctgccagtgaacggatcggcattttgcttttcatttggatttttccgccttcatgtgcggacaggacttcatcagatacggtgtgaagcctgatcccttctccgagggcctgtacagccgcgatcacttcctgaagctgttcttcattctccacttgaacggtaatattccgcattgtgtaattgggtccgacttttaccgtctccacttcaccaatatccccgcccagaaggccgatggccgtagccacccttccaagatttccgggaaccgaaggcgtttcgatcatcagtgtccgaatcatgtgtttcgctatcattcagtgatcctcccctattagcctagtttttcggctttaactgtattgtttttcgtataccatataaattttcctgtataaccatagataattgcaagacctattgctacaaaactgagccacataaacggcagataagagaaggtagaaacacctaaaataccagccatgtaaatcccattatcagaccaaggaaccatccccgaagtcaatgttcccccgacctctgagttacgtgataacactcttctgtccagatgtaagcgatcatagctgtcttccataattttcggagtcaaaataagagatacatacatcgcacagccgaagatgtttgctaaaaacgctacgatcagtgtagacaatgtgacattgccggctgaagttaatttcttttcaaacgttgaaacaatgacttttaacacgccgagtttctcaagcagaccgccaaaaccaaggccaaagatgatgacgacgagagaatcaagcataccgacaattccaccgcggtttaacaagccgttcaaaaattcaacatccgttttaatagagaagccgttgtacgcagttgcaatcgcatgggcaatatccattccttggaaaacaacagcccagattgcaccgagtaaagcgccaattacgataaccggcatagatggctttttcatcgccaataagactatgacgagaactgccgggatcagcatccaaatatgaatgtcaaacgtgttttgcaaagatgattttaagaattcaactttatcaagatcaatatttttcccgccgtacataaatccaacaactgtaaagagtatagctgtaatgacataagcaggtattgataaataaagcattgctctcacgtgagccaatacatcgacttttgatagtgaagaagctagaactgtactgtcagacagcggagacagcttgtccccaaaataagcacctgaaagaatagctcccgctactagaggaagcggaatgcctaacccctctccaattgcgatcatggcaatgccggcagttccgactgttccccatgacgttcctgttgccacagacataatggaacaaataattaacgttgccagtaaaaagatacttgggtgaataaattccagtccgtaataaatcaaagtcggcacaacgcctccggcaatccatgttccgatgagcgccccaactgaaacgagaatcagtacggcttcaaggccatttgatatcccatgtacaatcgcattttgtaaatctttataagaataaccgagtctaatacctaaaagcattgcaataaaccatgaaacaaaaagcgccagctgtatcggcaagtcgagaaagactgtaaacgatagaacaagtgctaaaaatactcctagtacaataataatttcaaatagtgttggcaatcttacatccttcaaaagaagtcccccttcatgtaaaagctaaaacgctttcaatatatagtgcaacacgtatactatacttcctcatccctatgttgtaaacagcttattcatccgactattcggagatgaataagctgtattttatacaaattttatttttctaatagttctttccctgcgatacctggtttggtcatctcatatgggtttaaaataatatccaattcttcttctgtcagcacatcatgctgcaggcaaaggtcacggactgattggcctgtcataatcgcttccctggcaattctggcagccgcttcatatccaagatgcggattgacagctgtgatcacgcctgcgcttttttctacgtattgcttcaaccgcttttcgttggcttcaatgccttttaagcagttgtcagtgaacgaacggaagccgttgttcatgatgctgatggattgaagcaaattaaagacaagcacgggctccatgacgttcaactcaagctggccggcttctgaagcaaggcagattgtattgtcgtttccgataacctggaacgcaatttggttgatcagctccgccataactggattgactttccccggcataatagatgaacccggctgacgtgcaggcagagaaatttccgcaagtccggcgcgcggtcccgacgccattaagcgcaggtcgtttgcgatcttcgacatgttcatcatgcagacttttaatgaagctgatacctctgtataggcatctgtattttgtgttgcatcaacaagatggtcagcgccgacaagaggaagcccgctaatatcagcaaggtgctttactacctgtttgatatattcaggatcagcgttcagccctgtaccaacagcagttgcgcccatgttgacttcatacaggtgctggcgcgattgcttgattcgtttgatatcacgctcgagaacacggctgtaagcttcgaattcctggccaagacggatcggaaccgcatcttgaaggtgtgtccggcccattttaataacagagtcaaactcctgtgctttttgcttaaacacactatgcatatcttccattgttttcagcagtttttccaagagcttcaatgtggaaatatgaatagcagtcgggaacacatcgttcgtagactgtgacatgttcacatgtgtgtttggacttaaatggatataatctccctttttatggcccatgatttcaagcgcccggtttccgataacctcattcgcgttcatgttcatagaagttccggcaccgccctgaatcggatcgacgataaactgatcgtgccacttgccttccagaatctcgtcagcggcttgtacgatagcttggccaattccttcatacagccgtttcacgtccatgttggcaagagccgcagcttttttcacaatcgccagtgcgttaatcatttcctcatggattttgtatcctgtgatcgggaaattttcagaagcacggagcgtctgaattccgtaataaacatctgcctcaatttgtttttctccaaggaagtctttttccacgcgatattctttttggccgtttaacataatctttaaccttctttctctttgctggttatcgtttttacattttacaggacaacgtcatcagcaatcggtgtttccataattctcttgacgacaggaagatccgaagactgacctagtgcccacatcaattttggcacaattgcttctgtgttcatatttcttgatcggataattaagtcttggttgaccctgcggccaacttcgtaaatgctcatgtcttcgccttcttcaagacattgagtcgtaatgacgacgacaatgccgctttcgatcagttcattcacttttgacaaaatgtctctgccttcaaacggcacccctccgctgccataactctcaatgacaatccctttgtacatgcttttcagggcatcaaacatttcaggctttaagcctggatgcagcttcagcagacatacatctgtgcatagtgaagtgtcaactgtgaaggtgtcgttctcaggttccgttacttgtttgttgtattcgatcccgtcttcattgataaaagcgatatatgggtaattgatgctttcaaatgcgtcgtagcttttcgttcttaatttgatcgcacgcgttccctgaatgactctgccgtcaaacacaacataaacgccgcccacgccttcacaggcaaatcgaatggcatctgtaatattttttttggcatcggttttttggaacgtgatcggaatctgcgagccggtgatgacaatcggctttttggcatgctgcagcatatacgatagtgcggcagatgtataggccattgtatctgtaccgtgagtaataacaaacccgtcataggcatcataattttccttaacggcttctgctatttccacccagtattcaggctgcatattggtgctgtctatattcataagcgactgagtttccattgtgtaatcgttatcaagttttgatacgtaacttaataattcatcagccttgactccgggagccagcccattttccccttcaactgaagcaatcgttcccccagttgtcaacatcaataattttttcataccatgcacctcttcactgtatctaaagatgggttgcgagaaggtattcgcttttcgcatacttttaatgcaattatagacacggaaaataaaatacgcaagacattattattcaattcgcgtacacttcctaatacctatatgatataatcagctcaaggtgaaaaaggagcggaagttcatgaatctagatcgtttaactgaattgagaaaaaagaaaaattggtcgcttcaatatacagctgaccttctcggtatcgcaaaaagcacatatgccggctacgagtcaggctaccgacggccttcacttgaagcgcttgccatgctggctgacctctttgacacaacctgcgatgaacttttaggccgcgagaaacaaaagcagactgctcctcaggccatagaattggccacgtggagcagccttgactttaccatttctgttgatggccagccgctgagtgaagatgaaatcatccagctgattacctttatacgcacaaaaagaaaagtacaggaggaactgagttaatctttagctcacggtttaattttaccgtaggttcctcctcctccggctttcaattccagttttccggatctcgcttttacgataagcgccgcagttttcggcgggacaatgcgagccaaatcttcttctgcagcctcatgaagaacagccatttctgttccgaaggctttttttagtttgtccagcgttttcgggcctacacccggaacaaattgcagcgggatctgatgtacatatcgcggacgcgggacgcgaacttcaagctgatcactcaattcacgcaatctttcgctgactcccttggtaaatctggcatttccgcaattcgcgcacgctgtttccccgcttacagcaggctctccgcacgcttcgcaagcggtctgataatatttccccaataacgggtccaagccataatttgcgataattttcctgtcatcttgtccctttaatgcaagagcaaattcagtaaaatcagctgactgcacatatagttcattatattctctgccgattttccccaacgaatgcgcatcagaatttgttaaaaaaggatacggattcaattcagatacctgtgatgccatgtctgtatcacagcttaatccaagctccaccgcgtctatcatagatggatcaaaaacctcagttaagcttgatttaaccccttttccatataagcttttatgcggcgtaaagatatgggcggggataaacaagccgcccatatcctgcacttttttttgcaggtttaagcccgtttcataaatccgctgcgagcttaaatgaatatttttcagccgggctgacagccagtttgaaaactgtttcatatcagccagcgtcggcataaatacgagcacatggatcggtccgctacaggcttcatcataaatctccagctcgctccccaataaaagagtcgtgctgcgataacggattcctcccccgtcaagctcgcgatattttccagatgaaatgccttcctcaagctctagaatgacttccggagaatgacagtcgataatgccgaggagttcaattcctttatgttcactggcttcaaccaaaattctgtccagtgttaatgttttagcgcctgttattttgacagcccttcctgtaaaggtccggccgatatgaatgtgcaaatccgcgtaaatctttttcatttttgtgcttggagcgcttctttcagctgaagatactgaatcgcgtaggctgttttagcatcgtatacttcacgcgattcaaccagctttagcgcatcttcaagcgtcacctccatcacttcaacaaactcgtcctcatcaagctcccgtttttcttcaagcacagaaagctcctcagcaagaaaaacgtgaacgatttcatctgcaaatccgggtgatgtataaaacgcagttatttttgtcagtttttttgctgtataaccggtttcctcttcaagttcccgaagtgccgtatactccggctcctcacctttttcaagcttaccggccggaatttcaacgatcgtccgctcaagcggcttacggaattgtttgaccaggatgattttcccttcatctgtgacggctagtaccgctactgctccagggtgtttcacaatttcacgtttactggctttgccgtttggcagctctacatcctcgacataaagatcaatgactttacccgaaaagatctgttctttggcaattgttttttcttctaatgatttcatttcttcatctcccgttctgtctctatatgatgccccatacattttatcatactagagcaaaagggggcttcttcgtgaaagtgcaccgcatgccaaaaggtgttgtcttagtcggaaaagcatgggaaattcgggcgaagttaaaagagtatggacgcacatttcaatatgttaaagattggatctcaaagccataaaagttgaaactttagctcctttatattacggtcaatacaaagcctaaaaaaggagtgtgcacatgagaaagcgcaaattgggtacatctgatttagacattagtgaagtcggactcggctgtatgtctcttggaactgaaaaaaacaaagcattgtccattctggatgaagcgatcgagctcggcatcaactatttggacacagcggatttgtatgaccggggacgcaacgaagaaatggtcggtgatgcgatccaaaacagacgccaggatattattctggcaacaaaagcgggaaaccgttgggatgacggaagcgagggctggtattgggacccttcaaaagcttacataaaagaggcggtaaaaaagagccttacacgtctgaaaacagattatatcgacctttatcagcttcacggcggcacgatagaggacaacattgatgaaacgatcgaagcgtttgaggaattaaaacaagaaggtgtcatccgctactacggcatttcttccatccgcccgaatgtgattaaagaatatgtaaaaaaatcaaacatcgtcagcattatgatgcaattcagcctgtttgacagacgccctgaggaatggctcccgcttttagaggaacatcaaatcagcgtagtcgccagaggtcctgttgccaaagggctcttaactgaaaaaccgcttgatcaagcttcagacagtatgaaacaaaacgggtacttgtcctattcattcgaggaactgacaaatgcccgcaaggcaatggaggaagtggctcccgatctttccatgacagaaaagtcgctgcagtatctgctagcacagccggctgtcgcttcagtgattacaggcgccagtaagattgagcagttacgggaaaatattcaggcagcaaatgcacggcgtttaaccgaggaggaaatcaaagcgctccaatctcatacgaaacaagacatttacaaagctcatcgctcatagcagaaaaaccagcacccgtacaggtgctggtttatttatattgatgccaatccatttggctttcatttaggagttcttcaaagctcttatttttttcgatctcttttttctttctgatctgttctgctttttctctttcctgcctcttttcatcctcttccttcaattggctcttcatctccataagctttgctttgatatcggattgaaggccgtcttttagctggtgtttgtcagcaagatttttgttttttcattcagacttcccccatgttttgttttgaagacagtttatcacggagcatatacactgaacaagccgactctcttctgatcactttctcagcggagcagtgtttaggtataatgatttcaaacacgaattgcctatatatttagttgaaaggtgctgtgacttttgaagaaaatccttttggccattggcgctctcgtaacagctgtcatcgcaatcggaattgttttttcaaatatgattctattcatcaagaaaaaaacggatgaagacattatcaaaagagagacagacaacggacatgatgtgtttgaatcatttgagcaaatggagaaaaccgcttttgtgataccctccgcttacgggtacgacataaaaggataccatgtcgcaccgcatgacacaccaaataccatcatcatctgccacggggtgacgatgaatgtactgaattctcttaagtatatgcatttatttcttggtctcggctggaatgtgctcatttatgaccatcgccggcatggccaaagcggcggaaagacgaccagctacgggttttacgaaaaggatgatctcaataaggttgtcagctggctcaaaaacaaaacaaatcatcgcggattgatcggaattcatggtgagtcgatgggggctgtgaccgccctgctttatgctggtgcacactgcagcgatggcgctgatttttatattgccgattgtccgttcacatgttttgatgaacagcttgcctaccggctgagagcggaatacaggctcccgtcttggcccctgcttcctatcgccgacttctttttgaagctgaggggaggctatcgcgcacgtgaagtatctccgcttgctgtcattgataaaattgaaaagccggtcctctttattcacagtaaggatgatgactacattcctgtttcttcaaccgagcggctttatgaaaagaaacgcgggccgaaagcgctgtacattgccgagaacggtgaacacgccatgtcatataccaaaaatcgggatacgtaccgaaaaacagtgcaggagtttttagacaacatgaatgattcaacagaataaaaaagcgaaaggcctattcggctcttccgcttttttatgttacagaacgtcggtaatgccatccatattttctctgatccattcaatcgcaagatctatcgttgtaaactcctgcgtctcaaaggtcatttcatcctgcaatagccagacatctttcttgatggactctgctcctccgattgaccagtgaagcaaggtatagggatggttttgattcaggaaggatacccacgttttattttgtgctgtgttcttcattgccttcagcttttgttccacgtttcgcgtctcctactttactaatatgctcattctggggctgagcatttcagccgggcttttcagcgccaatgttttggctttttcattgtaatcgatcgtcatttgatcgtcaaaaaacactttttgtgacgattggatatacagcggaatgccgttcgtttccagctgctcgcactgtcccgttaattcttctgccagccagattgtggggacaccgcttaccgcgcagccgcatccttctgcatcgtaacgaagctgggctttttttcccgggttggcgtcaaacgcctgctgcagtgcctgttttgctgcatctgtcacatgtatgttcataaggtgaaacccccgttttcatcattttcgctattgtagcatacaacactgccattcgcattgtttctgccttttttccaccgcttcgcattttcttctgcagtcttgatccactcatctttcccttttatgtactgattgatgctgtcaggatgctgggccgccagccgttttttgagaacggcgtattctttcgctatgtttggatgagctctgagataatctctgaataacagatgcctttcaatagcagggtttccctgttcgtacatatggacatgatgagtgcgtttatttccgcccttttggaaataacgcctgcccgctatgccgttctcaccttttggtgtatagccgttagccttcatttgttcatcaaattggctcacggcttcaatgcttctgacttcaattaacatatcaatgattggcttcgctgccatgttcggtatcgatgtgcttccgatgtgatgaacagcgataatctccggcccgaacacaagtttcagcagttctttttcttcatcgaaacattctgcccatttttcgttgtagagaatgacctcaacttttcttttcggatacaaatgaaagaccgacagcaatagaccctgcgctgctttgacggtttctgccttttggaatccggcctgtgtatagagtgacacggccggggtattgttctcggctgtgactacttcgattttctcagcgtcttcattatgatcaatgacaaattgcagaagtgctcgtccaattccttttctgaaaccgtcaggatgcacaacaagcctgcaaatggtgagatgatgcatgtttttctcatatgaaatgacaccgatcagcttgccgtttttccgatatcccgcaaaccgttcatgggatgcttgaatatccttcaccttctcttgtaaagcgggaataccgtcaaaaccgataatctctgtttcctttatgtaggcggggatctgtacggctaaaatctcacgcgctatcgtgtcttccttatgctggagaaattcaatcattcgtgttcctcctgaaacagccgctgtctttcgacttttgcgacgcggactgcatacgactcgtaccaaaggctttttcctttttcttttgccgcttgatgttcagtgtgatgcttccaatggttaattgcgtccatactgtcccaataggaaactgtgatgccccttccatccgcttcacgtacgctttccacgcctaaaaatccaggctgatccgccgcaagtgataccatccgctccgctgtttctccatatcctgtgtcattttcgcttttgacagaagaaaaaatgactgcatagtaaggaggctcaggtgtttttgataaaaaatccatcatatttccccctcatatgtttttgacaaacagtaccctgtcttgacccggaccatcatagtttgcaaacactgagatgccatttaccgtcttggtgcccttttcaatatcaaaccccaattttgtgtgatatgcgattgataccttattcacaggtgaggtgacgcactttacccgggtgcagcctctttgttttactgtttcgataaatacatcatacaattgtttacctatttgcatttttctgaaatctggatgcacaccggaaaaatgaatgtacgccgtttcaggatccgattgcgattgaaatccgattaaaaatcccgtcatgctgttatgttcggatgtaataaagcttgtgtcctgaaaatgctcaaaaaatagtctcggcaatttttctttcagctgtctgccgccccaccattcattcagtacagacgttaccatttcataatctgaagacgtgattgttcgaatatccattacgatttgatctccctccgtctggcaaaacgaatgtcagctctttttctcacaatataaaaattatattttgcctggctggaattgtaaatgccttctttcctgtatcatacgtttccagactgccgagggaacaatgtttgatcattttacgcctatttctcccccaaacaggaggagagactttacagcacaatatcaagcacttgatcaagtttcagcttataaagctgatcctcgtctccttttatccatactgctttttcaaactcttcataccggcagattttcccggtgcagcagacaatctcaccgtcctgaaagcagctgacagtgatatcctgagcaaactccatcgcggtgcaaagcgtttgattcatctcttccagcttatcggggtcaaggatcggcttttgcagcttctgtttaagtcgctttctctccagcaggctttgcttatgttccggcagaaacatcctgctcccttcccacagcaggttgcccctttttaaatgatcgttcatttataatgcccccctattttagccgcacgttcaaatgcctggcctgccgctgtcagtgacgccgccctgatgattgctgtgtcgccgaatcgatttttaatgccgtccatcacatagcctaggctcattttctttgcataatcctgaaataaattgagctgccatatgtcatcagatgagagctgagacagattgacaccgagacggcggacaggtttcccgtcccaaaatgtaagaaacagccggcgtacagcctcatatacatcctgcgtagaattagtcggctctgccagcttcacttgccggttgaagcccgtcggccaatcaaaatcagcaccccggcagctcactgacaccgtctgccccatgaccccggcgtttcggcttcgcctgcacacttcttcactcagctcaagcaatacgaccttgatttctttgtcaaagtgttcgtagtctctcgggagagtcattccatggcctatcgccttttgcccgtccagagacgaagttgacacaggggaatagtcgattccgtttgccgtcatccacagcacgtggccgttaatgccccatttcttttttaaaagatcgagcggaaaagccgcgagcccgccgatcgtgctgatgcccattcgatttaaatgatgcttcatgcggctcccgacgccaaacatgctgcccaccgggagcggccacatttcggttttcatattttctttcgttaaggtaaaaataccgttcgtattctttttggcaaaattgtcacacgcaattttggccagcgctttgttagggccgattccgacccgtgcataaacgccgatctcccgcatgattctgccctgaatgcttttcgcgatctccatcggcgtcccaaacagcttctggctgcctgtaatgtccatgaactgttcatcgatagaataaggctccacaaggtctgtatactcctcgagaatggccgtaatttgcagtgatacatcaatataccgctgcatacgcggccggagcacaacagcctcaggacacttttcctgcgcctcccacagccgtgaagcattcaccacacccttttgtttcgccagcgggcaggcagccaatacgactccgccccttttttcagggtcacccgaaacaatgacgggcttatttttcaaatatggattttccgctttctctacagatgcataaaacgattgcatgtcaacgagaaaaatcactttttctttcatcatacacacctctaaaaagaacttatgttcgtttttcattatatgcgaaagtatgttcgttttatactggtaaatgattcttgtctgacagaaaatatgatccaagggtttgagagaagaaaaacatttagtagaataaaagcgaacataaggataggagagtcatgatggagaaatttgtcgaaaaaatgatggaacaggcattgcgtcaatacggcagaaacgttgctatagatccgttaagcccgtatgaaaaacaaagcctgaaagcggctctacaagagagacggaatgaagaaccagatgaggatttgcatgcgcatatagaagatatcatttatgactatgtcacaaaccaaggtctgttctcttaaacgcatgactgtcagttctttcagccgctgatgcggcttccctttgaaaacaccgcctgaaacaaataaacagtctcaggcttacagaaaaaagcaggattttctcacgctccatagattcatatggcctggcgtaaaattccccctcagaactcgcgcaaaacggaataagctgtccatgatcacgcgtatacactttttcgaagagatgtgctctcttgttctgtcatgcggtccatcggttttcagcttacatcttgatctcatagccggtttcactgccgatatgatctacgtcctggcggcttaaactaacacaccctcactgaccaatcgctttgcttttcatcggacatcccgtcatttttcttcttcaatttcaagatgtaaactccgtcagccacacgcatcctcaacgcatagtatattgccatccatacaatcaggcatactacatgtcaaaaacgaaatattttgaatgatctattggagaaggaaattttttcatatatgatagaggaagatcttacatacaggagagaatataattcatgaagaaatggaaagatatccacccgatcagctggacaattataatcggaaccattttcggcagaatggcaacatcgatgagcattccttttttagcgatttatttgacagccgtccaaggcgcatcagcttcctatgcagggctggtcatcgccgcgagctcatcagtcggcatcctcgcaagcttttacggcggatatatctcagataaattcggcagaaaaaacatgatgcttgtatcgattttcggatggatgctggtatttgcaggctttgcggcggcatctcatctctgggtgttttttgtagttaacgcattaaacggtctttgcaaatcactgtttgagcccgcttcaaaggccttgctgtctgatatgacagaagaaaaaacgagactgctagtttttaatttacgctatgcagctattaatatcggcgttgtcttcggacctgtgcttggcctatatttcggctcatcgcaatcgactacgccctttttggtgcctgcagtcatttacggactatacggaattgtgcttgccctccaatttaaaaaacatccatccttatcagcaccagcccagtcccgaaatatgagcgtgcgggaagcgtttatggtcacgcaaaaggattatctttttaccattgctttggtcggcattacgctatgcaccttcggctactcacaattcagttccacattccctcagtatatggcgcagaaccccttgatcggcaatggaacgaagctgtatgggctgatgctgacattaaacgcaatcgttgtgttggcgacgcaatttcccattgtccattttgcaaaacggttttcgccgctttgttctctgatgctcggtaatgtgatggttagcatcagcatggccattttcaccgtatcgcacggtgttccatcaattgtgatgattgtcatcacatttacaatcggcgaagtgcttttattctctatgatggatttgtatgtagaccagattgcaaaaacagggttaaaaggcacttatttcggggcaatcggtttttcacagctcggaaacgtcatcggcccttgggtcggggggatatgtatagacctgtttggcgctggccgtccgatttatattttttctgtcctgagcggcattaccctgctcggcctgccatttttagcgttcgcctatcggcagatgaaaacggagactacaaaacaccgttcccgtctggaaaagccgctttaaataaaaaaacgggagagaatcaatctctcccgcaacaatgaggtgatgaacatgaatataggcgatatgatgtttcagctgtttgtatttattatatttgccgctgttatctttgcggctgttacaggcttcaagtatgcgaaaaaccgaaaagcgcagctggatcgcattgagaaaaagctgaacagcctgtccgaagatcacgattaacagcttggggcaacgagctctaccttaatccgatccggatcctcacaatagactgcataatgcccgtctcctccggcaaaaggatgcctgtctcggtacaacacacgatagccttttgccgtcaatttttcggtcatctgatcgacttgatgcttggattcagcataaaatgcgagatggttcagaccgactcggcatctatggtattccggctctagaaatggctctttcgcctgcacaatcactaggtaaaaacgatctttcttccagctgatgcctgagctccatttttgatactctttatagccaagttcttttaagaaccagccccaaaaccgcctagacgcctccaaatcagagacatacagttcgatatgatgcacaatttcataccctccttaccagcacttcctcgaccttatgcccgtctcccttacgcaaaatgagatctgacctgaatttagtcggcaaaatattttcatataaattcggccggttgacactctcccaaatcgaggctgccatctcgtcagcctcctgatcggacaagtctttaaatttatgaaaatatgaatcaggattttgaaaagcagtttcccgaagcaggcgaaaacgctctaaataccaagtgaaaatccggctttcctccgcatccacataaatcgaaaaatcaaagaaatcggaaacaaaaatacgcgggttttcccggtcatcctccaaggtgggcgactgaagcacattaatgccttcaataatcacaatatccgcctgttctacaacctcgaacacaccttcctcgcggtcataggttagatgggaatacaccggggcctttacgctgtcctttcctgattttaagtcattcaaaaattcgagcagcgcctttacatcatagctttcaggaaacccttttctagacatcatatttttctttttcagctcggcagtaggaaataaaaaaccatctgtcgtgataaggctcacttttggacggtcaggcaaacgcgaaagcagcttctgcaagatccgcgccgtcgtgctttttccgactgcgacactgccggcaatgccgataataaacggaattttggctgaatgtggatgcttcaaaaaaacattgacatgcttattgcgttcagccgcagacttgacatgtaaatgaagcaagcgaacaagcggaatatagatcgtttccacttcttcaacagatagataatcattcaatccttccacagcttttgcctcttcttcagatacagcaatcgacaaatgccccccaaaaccagaccaagactcccgattgtgctgtgtatataaagtatgtaggttaagttctttatttttcactgtttacacctgactctctgtaggttaaaacccttacaaagattgtaacggaaaaccttttcactgtctgcttatttttcatttcgtttttttagcaaatcagcaccaattcggttatacgcagccatttcatcttttggaaccatgcttcctcccgttccccagacgacatgtacagcatgttccatcttatatttttgaccatagcgccttccctcttctgtcgaaaaaagctgaaccggcccgaacatgcccgcaagagcagagggctctaaatatttatcttcagatacagccagcatatgaagcaaagtataaagcgtattgtcctctaccgtataacagccgctcagaagcggttcaatcagcttgccgacaaatcctgacggcctccctacggcaagtccgtcagcagcagtctgattatccaggccgatatcctggacggagatcttttcgtgaagtcctgaataaagccctaacagcatacaaggtgaatgagttggttctgcgaaaaacacatgaacatcatctccgtataaaagcttcagcccaaatgctacaccgcccggtcctccgccgactccgcacggcagatacacaaacaagggcgtctcaagacttggctttatattcatacagtcaagctgcgtttttaatcggcttgcagcaacagcatatcctaagaacagctgtcgagaatgttcatcatcaataaaataacagaatggatcatgttccgcctgccgtctcccttcgttcaccgcttcgctgtaatctgtttcgtactccataacagtgactcccttttgacggaggagatcctttttccactgcttagcatcggcggacatatgcactgtcacgcgaaagccgagtgccgcgccgatgatgccgatgcttaaacctagatttcctgtcgaaccgacagcaatcgaatagcgggagaaaaacccggtaaaccgctcttcctgtaagatgcggtaatcatcggtttcctgaagcattccttcttgaagcgcgagattttcagcatgctttaacacttcataaatcccgcccctcgctttaatcgatcctgaaatcggaagctcatggtcgcactttaaaagccatcttccgggaaatggctgctgatatgccgcttccagctttcccttcatatgctgcacctcaaaaagcggagactcgatgattcctttagcgcctttcgtctcaggaaacacctcggcaatgtaaggtgcaaaccgctgcattcttttttccgcttccgctatctcggttgcccactcatctgcacggggtaatggcccctctttcttgcctgaatttgcccagaatacaggctctgcatcaatcagtttctgaataaacggatctttaagcagagcatgaaggacttctgaatgaactgacattcaacaatctctcccttccactatcaaaaactgccccgtgagaaacaagccactccaccacaggcagttctatcattattttttcatgagcgcgcgtcctgccagcttttctacaagagctggaaacagctgatacagcttagtgccggcattcattaaacgcggaagattgatctcccgctttttcgtaaaaattgcagctgtaatttgagctgccacgtcatcaggatcaagcatccagcggccgacatttttggcgtagtccccgcctttatcagcaatggaaaaaaagtccgtctgaatcgggcccgggttgactgttgtcacataaatgccggttcccgaaagctccatccgcaaagcgtttgagtaacctaacacggcatgtttggtcgcggaatacaggctagacttcggtgttgcgattttccccgcttgagaggcgatattgatgatatgtccctttttttgctcaagcatctgcggaagcaccgcttttgtacaggcgatcaggccgaagacattcacatcaaacatcgctttcatgtcatccaatgtagagtctaaaaccgtttcaaatataccgaagcctgcattgttaatcagtacatcaaccgagccgatctgatcgcggacccgggcgatatcctctaggcggccgacatccagaggaaaaatctcacactgtccgctccattcctcggttattttccttttgatttctatcaaacgatcctcgcgtctagccgacagaaggacatgggctccttcagccgcgcataagtatgcgattctttcaccaagccctcctgaagcgccggttatccaaatcctttttcccgctatatgtttcacccatttcacctcttcattgttttaaagtatgcggtatttccttcccaatatgacgtgatggcttcttcagcctccaacacatcaaggtgacctgccgtttctgacatcgttaaaaacaattccttttcatatacagcaggaaaaagctgctgacagacctgaaaagcggtcatcggcttttcatccagcatgcgacgcacatcctccgtcctgttcctctgcttgtcaaaacgcttctcaatcagcgcttgtacactggtgataggctcgccgtgaccaggaaatacgattgttggatcaagttgagacagccttcgcaatgaccgctgataatccactaaaggctttgacctgacgtcccccgctttcggcgcttccaaaatcggattagacgagctgtttgccagcagtagatcgccgccaagcatccttccgcttttttcatggaacagaacgatatgcgattcagcatgtccaggcatctccaacacggaccagccctcaagcccatctatgcccataccttctctgattgtttttgtcagagatctcgtacaggaaaatgcgtacgctgatcgaatcagcttttccgccttccccgtatcaaatggaacgcctaattcaggcagcagcttttgaaaaaaacgtttttgccaatccataaaggcttgatctcggctgatataaggttcgttgaatgtatgcccaatcacttcgatttcatctgaaaagacatcaagcaagcctgcatgatcagcatgatggtgagtcagtacaacctgctcgatatctgacattttcacatttacagcggcaagctgctcttgtagggctctggcagcctcttttgtattcggcccggcatcgataagtgtcagtgcatcaccttttacgaggtaaacgataacatcgccgacagcaaacggcgtcgggacgcggatcgcaattacatcttcagttgtcatcctttcgctccttgtcttcattcattattcatattttagctttttctcggtcttgtgtcattattgcagaatgagaacaaacctttttgaaaaagctattgacattagcttatccgccattgcataatgaacaacaaactaaaacgagaaccattggaacgctatgacgaggaatagtatacaaggcaatggcctaagagagcgatacccccggctgaaaggtgttgcggcccgcttgtttgtagaacctgccctcaagtcgcggttaggaaaacctaaacgtttcccgcgttacgggatttgagctgagcacaatttgtgctaatgagggtggtaccgcgaaccttttcgtcctttacgtgatgaaaaggttttttgttgttctgatagaaggaggatatcaatgaaaaagataggatttgtcggcgccgggtcaatggcagaagcaatgatcaacggcattttgcaaagcggcatcacaaaaccagaacatatctatattacaaatcgctcaaatgacgagcgtctgattgaattaaaggaaacgtacggcgtgcgtccatgcagagataaaaatgagtttttcactcacaccgatatcattatcctcgctttcaaaccgaaagacgcggcggaaagcatcgacagcatccggccgtatatcaaggaccagcttgtcatttcagtacttgcaggccttaccatcgaaaccattcagcattattttggcagaaagctcgcggtcattcgcgtcatgcctaatacatcagcggcaatcagaaaatcagcaaccggattttccgtaagcgctgaagcaagccagaatgatattagtgccgcaaaagctctattgaaaacaatcggtgatgcaacactggttgaggagcgagatcttgacgctgtcactgcaatcgcaggcagcggcccggcctatgtgtatcgttatattgaggcgatggaaaaagcggcacaaaaagtaggattagataaagaaacggcaaaagcactcattttgcagacaatggcaggggcaacagatatgctccttcaaagcggcaaacagccggaaaagctgcgtaaagaaatcaccagtcctgggggcactacagaggcaggtcttcgcgctttacaggactcccgctttgaagaagcaattattcactgtattgaagaaacagctaaacggagcgcagaaatcaaagaacagtttgccgttgccgccttagagagacattcttagatgtaagacaaaaacagaaggcactgtgccttctgttttttatttttcccgcagcagctggccggcagattctgattgctttaatagcgcggagatcgtaaatgaaagcaaatcgggaagcacttcaaaggaataaggcatatacaatctttccgtccatttatgcgggtctttaccagccggaccgacatttaaaaccggaacatataaagcctgatttttaccgcttggcaatgaatatcctctgttaaagagcggcatattgcttgtgtatgcatcaacctcctgtttttccagctgaagataactcaagtccgaaagtccggggaagtactgaacctcccgtaatgcaatgccgtatcgctcagccgcataatgctttatctgatctgctgtatttctgatcaattgatcatcctttgaagaaacagctggataaagcggcggactataaaacagaacgatgagcggcgcatcctccttacaaagcgaagcaagctcagaaacaattttcgtcgaaaaatccctgtctccaagctcccccctgttagcaaaggcataatttagagcccgctctgtttccgagatccccgcacgcttttttgcacgcgagaccagctcatcaaatgtcaaaacagtgacgtcccgctcaatcggctgaaatggctcaaattgttgaaaatcctgtgttttcttccgaacgttcgacatgatttcctccgccgcctgttctgctgttttaagcagcatctgatgcagctcactagctgagcgtttcattgacagcacattaaataatgtgacggctgtatgcggtgtctggactgaatatgcctctttcaagtccttttgcattaagtttaccggcggcggagtgacctcgccatcaaccttttcgcaataatcagcattcagttcaagcaaacggttaatctcagataccattaaatttgcgtttaggcctgaaaacggctctccaacatgtgtctcaatccccttgcagaaaaaacccgcaagcaccttgccaatgcttcctgtataaaaatattgctgctggtcgccgggaaatttttcaaacatcggttcggcattcaggcaagcggttaatgtgatatcatgctttttctccatctccttcaatgcaggaaccgcttcaatcatgcctcttgaattcacttcctcgtccggaaccgttatcaacagcagattgccctcaaaatgcccgttcattgccctctccagcatcgacagttgaatacaaagccccgctttcatatccatcgtccctcttccgaacagccagtctccgctttcggcatctcttctcacacgttccgggagcagctcttttttctctaaaaaggagctcaaaagctcagcaggcttgcaagccatatgtttaaattcgccgtaatcttctatgtcaacgacatcaaaatgactcagcagaagcactgtctttttgacattcttctttttgactagagccgtaagaaaagatctgccatcgtccatcggatgaagtgttacatcatcagggtgcttttgaaaatagggcttgtccttcaaaataaaataaagatactctgcaagcgctgcctcgccctttgaaccggtgatgctttcgtattgcacaagagaagttaaaagtgccagcaattcgtccttcgtctgccaattcattgattccgcccctcctatgaataaaaatgcttctatactgaaaaataaactgatttctcgtctattatacagaaatgtttgacaaaagcggttcatttgagcagtttatatgacgggaaagaaatgacttgatataatcaatctctaaaaaccttacgggaggcgaaagaaatggccagaaaattatttacacctattacaattaaagatatgacgttaaaaaaccgcattgtcatgtcgccaatgtgcatgtattcttctcatgaaaaggacggaaaattaacaccgttccacatggcacattacatatcgcgcgcaatcggccaggtcggactgattattgtagaggcgtcagcggttaaccctcaaggacgaatcactgaccaagacttaggcatttggagcgacgagcatattgaaggctttgcaaaactgactgagcaggtcaaagaacaaggttcaaaaatcggcattcagcttgcccatgccggacgtaaagctgagcttgaaggagatatcttcgctccatcggcgattgcgtttgacgaacaatcagcaacacctgtagaaatgtcagcagaaaaagtaaaagaaacagttcaggagttcaagcaagcggctgcccgcgcaaaagaagccggctttgatgtgattgaaattcatgcggcgcacggatatttaattcatgaatttttgtctccgctttccaaccatcgcacagatgaatacggcggctcacctgaaaaccgctatcgtttcttgagagagatcattgatgaagtcaaacaagtatgggacggtcctttatttgtccgtgtatctgcttctgactacactgacaaaggcttagacattgccgatcacatcggttttgcaaaatggatgaaggagcagggagttgacttaattgactgcagctcaggcgcccttgttcacgcagacattaacgtattccctggctatcaggtcagcttcgctgagaaaatccgtgaacaggcggacatggctactggtgccgtcggcatgattacagacggttcaatggctgaagaaattctgcaaaacggacgtgccgacctcatctttatcggcagagagcttttgcgggatccattctttgcaagaactgctgcgaaacagctcaatacagagattccggcccctgttcaatacgaaagaggctggtaatgccataagagatatcctgtagaggatatctctttttttatttttagagaaacgatcggctaaggttctccgtctccctagtagaaccaattagaggagatgactccaatgaaatcagcttggatggaaaagacatatacaattgacggatgtgcgtttcatacacagcaccggaaaggatcaagcggtgtaacgattgtctttgaggccggctatggtacttcttctgagacgtggaaaccattaatggcggacattgatgatgaatttggcattttcacatatgatcgggcaggcataggaaaaagcgggcaaagcagagctaaacgaacagctgatcaacaagtgaaagaattggagagtttgcttaaagcagctgatgtaaaacctccttatttggctgtttcacactcatacggagctgtcatcaccggtttatgggcctgcaaaaacaagtatgatattatcggcatggtccttcttgacccagctttaggcgattgcgctagctttacctttatacccgaagaaatgcacagatcacatacgagaaagatgatgcttgagggcacacatgcagagttttcaaaaagtctgcaggagctcaaaaagcggcaagtccacttaggaaacatgcctcttcttgtgttgtcatcaggagaacggactgagaaattcgctgctgaacaggagtggcaaaacttgcacagcagcatattgtctctatctaaccaaagcggctggattcaagctaaaaacagctcccacaacatccatcatgatgaacctcatatcgttcacttggctatttatgacgtatggtgcgcagcgtgccagcaggccgctcctctttaccaggcagtcaattaacgtaaaaaaagaccgggccgtaagggattcccggtcttttatattattttgtttcacggtgaagggtatatttctttaaacgcggtgaatattttttcagctccaaacggtctggattggtgcgtttattttttgttgtgatgtaatttcggtctcccgtttcagtgcaggctaaagtaacatttactctcataattaacatctccttataaagcgtaatgattacgttttattatacaacgtcatcacaaattgtcaaataagagctccgccttcagcctcgcgggacgtttacctctaagaaatcatatgccgccacgctattggggaaaacgtcaaccgcttctttttgaagctccaaagaagcatctccctgatatcttgcgctgatatgggttaaaatgagctgcttcgctcttgcttctttcgctgttacagccgcttgttccgttgtactgtgataataatcataagcaagtttacggtcttccttagcaaaggttgcttcatgaacaagcacatcacaatccctcgcaagctcttttagtttgtcacttactctcgtatcaccggagaacacaacagatcttccctttttaggaggctccagaaaatcattcccattgatgattcgtccgtcttcaagcgttaccgtttcgccttttttgattttctgatatacaggtccgggcgggatgttcatttcttttaatacgtcagccttcaaggaacccggtacgtctttttcctgcacacggtacccgaaggcttccactccatgaataacagataccgctgtgacaataaactgatcgtcctcaaacacgattccttcttcaatttcctggatcgcaagcggatatgtcaaatgggttttcgtgacggcaaggcttgtttcaataaacgccttgatccctttaggtccgtacactgtcagctcgtcctctccgccttgaaaggaacggctccccagaagccctggaagtccgtatacatgatcgccgtgcatgtgtgtaataaagattttctctattttacgaggtttaatcgttgtatgtaaaatttgatgctgtgtggcttccccgcagtcaaaaagccataccgaacgcctttcttcaagcaattttaatgccaccgacgttacatttctcgccttggcggggatgccggctcccgtccctaaaaaaagtaattccacgtttccttcctcctactagaaccagatacctacaagaatacaggatcaagctcaaaatgtgaatcttgcctctgaaaagaacaatcctttcgtgctagaaacattttttcagcattctgcttaaaaaagggcttaaatgtttgctttcgttgaattttagatttaaaatgaaggaaatatacggggtgtactaaaataaagcttcgaataaagtgaggtacttttagtgaaaacaaaccaacaaccaaaagcagtaattgtcatattcggtgcaactggagatttagcaaaacgaaaattgtatccgtctattcaccgtttatatcaaaacggacaaatcggagaagagtttgcagtggtaggagttggaagaagaccttggtctaatgaggatcttcgccaaactgttaaaacatccatttcctcatctgcagataagcatatagatgatttcacgtctcatttttactatcacccgtttgacgtgacaaaccctggttcttatcaagagctaaacgtattgcttaaccagctggaagatacatatcaaattcctaacaacagaatgttctacttggcaatggctcctgaattcttcggaacgattgcaaaaacattaaaatcagagggtgtaacagctacaaccggctggtcccgccttgtcatcgaaaaaccgttcggccatgatctgccaagcgcacaggcattgaataaagaaatccgcgaagcatttacggaagatcaaatttacagaatcgaccattatctaggcaaacaaatggttcagaacattgaagtgattcgatttgccaatgcgattttcgaaccgctttggacaaaccgctacatttcaaacattcaaatcacatctagcgaatcactaggcgttgaagaccgcgcaagatattacgaaaaatcaggcgcccttcgcgacatggtgcaaaaccatattatgcagatggttgcccttcttgcaatggagccgcctatcaaattgaacacagaagaaatccgcagcgaaaaagtgaaggtgctgagagcactgcgtcctattgcaaaagacgaagtggatgaatactttgtgcgcggacaatatcaagctggtgaaattgacggtgtaccggttcctgcttatacagatgaagataatgtcgctcctgactccaatacagaaacctttgttgccggcaagctcctgatcgacaacttcagatgggctggtgttccattctacatcagaaccggaaaacgaatgaaagaaaagtccacaaaaattgtcgttcaatttaaggacattccgatgaacctgtactacggtaatgaaaacaacatgaatccgaacttgcttgtcattcatattcagcctgacgaaggcattacgctttacttaaatgctaaaaagcttggcggagcagcacacgcacagccaatcaaactcgattattgcagcaattgcaatgacgagttgaacacccctgaagcatatgaaaaactcattcacgactgtcttcttggcgatgcaacaaactttgcacactgggatgaagttgccctttcttggagctttgtcgactctatttctgaaacatgggcagcaaacaaaaccttatctcctaactacgaatcaggctcaatgggaccgaaagtatctgatgatcttttggcgaaagacggcttacactggtggaatatataataagaagaaaaaagccgaaaatgtttacaagcattttcggcttttttgcagctgtcacagaggtatagcactctcattaataacaaaacccccgaagctctatagctttgggggtttctattgattacttcatccattcagtatggaagatgccttctttgtcagtacgctcatacgtatgagcgccaaagtagtcgcgctgtgcttggattaagtttgcaggcagtacggctgtgcggtagctgtcatagtaggctaatgcgcttgagaatgatggcaccggcacaccttgggcaactgcaagtgaaatcacttggcgaagcgctccttgatagctttctacaatattcttgaaatagctgtcaagaagcaggttgtcaagctcaggctcgcgatcgtaagcttctttgatcttctgaaggaatgccgcgcgaatgatgcaaccaccgcggaagatcatagcgatttcaccatatttcagatcccagttgtattcttcagaagcagctttcatttgggcaaatccttgcgcgtatgaacagattttactcatgaacaacgcttttctgaccgcttcaatcagctcttctttattttctgtaacaggcttcacttctggtcctgaaagaagtccgctcgctttcacacgctcttccttcatagctgagataaagcgtgcgaatacagattcagtaataatcggaagcggaacgcctaagtcaagtgcgctttggcttgtccattttcctgttcctttttgccctgctttatcaagaatcacatcaacaagcggcttgcctgtctcttcgtctttttttgtgaagatgtcagccgtaatctcaatcaggtagctatcaagctcacctttattccattcagcgaaaacttcatgaagctcatcagcagaaaggcccagcacctgtttcagaatgaaatatgattcagagatcagctgcatatctccgtattcaattccgttgtgcaccatttttacgtaatggccggcgccgtccggaccgatatatgtcgtacaaggttctccgtcaacttttgcagaaatggcttcaagaatcggttttacaagctcatgtgcttctttttgtccgccaggcatgatagaaggtcctttaagtgccccttcttctccgccggaaacgcctgttccgataaaatgaatgccgctttcagcgagttctttgttacggcgctgtgtatctttatagtatgtattaccgccgtcaattaaaatatcatccttctctagatgaggaagaagagattgaattgtcgcatctgttgcagttcccgctttaaccattaataagattttgcgcggtgtttccaaggattggacaaattcttcaatgctgtatgtgccaacaacattttttccttttgcctcctgtaaaaactcctcagttttactgcttgatctgttgtaaacagaaacagaaaatccccggctttcgatatttaaagccagatttttacccatgaccgcaagtccgataacgccgatttgttgttttgacatattctaacgtcccttctgcaaacgtttaatcattttaaaatttaaattaaaataaaatgatatttataataaagaaattaccatacattcaccctttttttcaagcgattcagcttttcttttcatcatgaaaaaaatctttattaaagcttgttccctttgttttgctctcctctttttttaacgttgccccttttctgatcagtttggtaccgtactttttattcagcttttccatcatctgctgaataggctcatccttcgcatcttcattaaagctgaacaaatcgagctgtttataggcctgctctttttctactaaatccgttccggtaatgccaagcagcctgacaggatttttattccagtgtttaaaaaagaggtgctccgcttctttcaaaatgtcatttttttgatcaatcgggtttctcagcgtggtgcttcttgtgatggttttccaatccgcatatctaatcataataaaaagcttcgaagccatgacttccttgcgctgtaaacgggcactcacagaagcagcaagctttctaaagacgcctaacagctcttcttcatcactggaatcatgggaaagtgtcgatgagttgccgacgcttttaaattcgtaaatgcgctccgggtcaaccggcgcatggtgaatgccatttgctttatttttaaggcgcggaccgtttatgccaagcaggcgtttcagggagtgttcatcagctgcagctagctctccgattgtatggatgccgagtcccttcagtttttccgctgtctttttgccgactccgtgcatctctccaacaggaagcggccacaggatatcaggcacttgcctctttcttaaaatcgtaattccaagcggttttttcatatcagacgccatcttagcgagaaatttattcggtgcgatccctatgcttgacgggagcagcagctctttttgcagcctgctttggatttcttttgccgtctctagcgcgcggctgctgtatggtgtatcggtcatgtccatatagccttcgtcgatggagacaggctccaccaggtcagtatattcacgaagaatggtaaacatcgctcgtgaagagtttctatagcggtcaaagttcggcggaagaacgatgagctcagggcaatggcgcttcgcttgccaaaccggcatcgttgttttgacgccgcgcgctcttgcttcgtagctgcatgttaccacaatgccctttcgctcctttacgtttccggcaactgcgaccggctttccccggagagccggatcatatgccatttcaaccgacgcataaaagctattcatatcaatatggaaaataattcggctctttcccggcataaacaaatctccttttcggtcattagacaacagcttgtacatatagtaaaatgaagctattgaatggatgtgatgacaatgtttgtggaatcgataaatgacgttttattcttagtcgattttttcacaattattcttcctgctctgacggcaatcgggattgcattcctcttacgagagtgccgtgcgggcgagcaatggaaatcaaaacgaacagatgaacatcagacggtctttcacattaaccgaacagactttcttattattatatatcatcgcattacaacttggatacgtaaagtcttccgcatgaattcgcctgtgaacgatgaggaagacgccggttctcttcttttataaaccgcatttataaaaaggaggagaacaaaattgttaaaaacatatcaaaaacttttggctatgggtatctttttaatcgtattatgctcgggcaatgctgcatttgcagcgactaatcaggtgggaggcctcagcaacgtaggttttttccacgattatttaatcgaaccgttttccgctctgcttaagggtgttgccgggctgtttcacggagaatacggactctctattatcctcgtaaccattattgtgcgtatggttgtactgcctttgtttgttaatcagttcaaaaaacaacgcgtgttccaagagaaaatggccgttattaaacctcaggttgacagcattcaggccaaattgaaaaaaacgaaggaccctgaaaaacaaaaagagctgcaaatggaaatgatgaagctgtatcaagagaacaacatcaatccgcttgctatgggatgcctcccaatgctgattcagtttcctattgtgattgggttttattacgcgattcgctctacacctgaaattgcgtcacactcgtttttatggttcagtttaggacaatctgacattctcgtgtctcttagcgcgggagcaatgtactttatccaggcctatgtcgctcaaaaactgagcgcgaaatattccgctgtcccgcaaaaccctgcggcacagcaatccgcaaaattgatggtgttcatcttccctgtgatgatgacgattttctcgcttaatgttccggcagcccttccgctgtactggtttacaagcggactgtttttgacagtgcaaaacatcgtccttcagatgacgcatcataaaagtaaaaaaacagccgctcttactgagtcggtgaaataaaaaagcaaccccgcgcgaaaagccggggttgttttttgttacttgcaaagcataccgcgccaaacagtcttgtttatcatagctgaagcagaaatggccatccaaaaaatagccgtatcgtttaaaaagaaggaaatagggaatacctttactcacctccaaacgaaaggagcatatacgttgacggaacactttcagcaaaaaaacatttctgtacctgatggaatctggatcatgagacaaacctggaatgatgtcttatttgctcactggcctgttgatgtttctatccttcgcgctttggtaccgtccgttttagaattagatacatataacgggcaagcttggatcagcatgcttccctttatgctcacgaacctaagggcgcgttatcttcctgccattcccggtgcgcgtgcatttcctgagcttaacctccgcacctatgtcacgtataaaggcaagcccggcatttatttttttagcttagatgccgatcatcgtctggcggtccttggcgctcgcacattctttcatctgccttatttttacgcggatatgaagtccgaaaaaaacggtgatgccattgactatgtcagcaagcggaaaaatgacaaagaagcagcattccacgccgcataccggcccatttcagcgccttttacagcagaaaaggattcgctcgattactggctgacagaacggtatagactctatactaccaatcaaaacaaactctattacgaagacatccatcatcatccatggctgctgcaaaacgccgaagcggaaatttcagtcaatacggtgactgatgctcacggcattacattgccagagtcagaccccttgcttcattacgctaaaaaacaggatgtgttattttggccgcttaggaaatggagctaaaaaaacccgatgcgggaaatcgcactcgggttttctttttttattttgccgcctcttcaataatggcaacaaccatttctgccgttttaacgagctcttcgatcggcattttttcattttttgtatggatttgctcataaccgacagcaagattgaccgtcgggatgccatgaccagcgattacgttcgcgtcgcttccgccgccgctcgtttgcagctcgcttggacgtccgattttagcagccgcttttttcgcgatttcaacaacttggtcgccgtcttgatatttaaagcccggatacataacctcaatttcgacttctgcgcgtccgcccatatcagcagctgcctcttcaaaagcagctttcattttttgaacctgagcttccattttctcaggaactaaagagcgcgcttcagcaagaatatgaacttcgtcgcacacaatgtttgtttgtgtgccgccttcaaaccggccgatattagctgttgtttcttcatcgatacggcccaatggcatttttgaaatggctttgctagcgattgtaatcgctgaaatgcctttttcaggttcaaccccggcgtgagcggttttcccgaaaattgccgctcttaccttcgcctgtgtcggcgcggccacaatgatatttccgacttttccgtctgaatcaagagcatagccgtaggatgcagtgatcatagaacggtcaagcgccttcgctccgatcagacccgattcttcccctactgtgatgatgaattcaatcgtgccgcgttcaatgttttcttctttcagcaccttaatcgcctcaaacattgcagccaatcccgctttatcatcagcgcctaaaatcgtcgtgccgtcagttttgacgtaaccgttctctacaactggttttacgccgtttccgggtacaactgtgtccatatgagatgtaaaatagatcgtatctgtttgttttgtcccttttagcgtgcaaatcaggttaccggctccgtggcccgtgatatccattgtatcgtcttctttaacgtccacacctaaatcagaaaattttcgtttcagcactttgcagatttcagcttcgtgctttgtttctgagtcaatttggacaagctctaaaaattcttccagcaggcgtttttcattcaccatttgtaagtccctccatattaaagcggtatgttaccgtgcttttttttcggtctctcttctgtcttatgtgcaagcatatgaaaagcttgaatcagttttccccttgattcttccggcaaaatgatgtcatcgaccattccacaagctgccgctttgtatgggccggcgttttgctttttgtattcagctgttttttcgcgtttcgtcttttgcgggtcagctgaagctttgatttccttttcatacaaaatcgatgccgcaccttctggacccatcactgcgatttcagcattcggccatgcaaacacaaggtccgctccgatcgctttgctgttcatggccacataggcgcctccgtacgcttttctaatgatgagtgtgacttttgggacagtcgcttcagcataagcaaacaataattttgctccatgcctgatgattccattgtgctcttgctgaatacccggcagaaaccccgggacatcttcgacagtcaatagcgggatatcaaatgcgtcacaaaaacggatgaaccttgctgctttatcagcagcgtcaatcgtcaggcttcccgccagatgcttcggctggctcgccacgatgccgattgctttttcacccagccttgcaaacccaatgacaatgttcttcgcaaaaaatggctgaatctcaaaaaaagattgcgggtcagccagctccctaatcaccttccgaacatcataagcctttgtcgtatcagcagggacaagacggtttaataacggtctggacgcctctttctctggcttcggctctgttgtccggccattcagcggcaaataagacagcagttttctcacccctgtcagaacctccttctccgtatgcccggaaaagtgggcgtttccgctgacggcattatgtatccccgctccgcctaagctctccgcatcaacctgttcccctgtcactttttcaatcaccttcgggccggtaataaacatccggccggtctgttcagccataaatataaaatctgtgagtgccggagaatatacagcgcctccagcgcacggccctaaaataaccgatatttgcggaatgactccggaatataagacgtttcggtaaaatatgtgaccgtatccatctaatgataacacaccctcttgaattctcgcaccacctgagtcattcagcccgataatcggcgccttattttttgctgccagatccatcaaagcgcagattttcctggcatgggtttcgccaagcgcccctccgtacactgtgaagtcttgcgcaaatacataaactgagcggccgtcaattgtgccataccctgtcacgaccccatcccctaacatgcgctgttctcttgttaacacttgactttccatgaaggggtgtaattcgataaagctgtcctgatctagaagaaatatgatcctttcccgagcagtgtgcttgcccttttgccgctgctgagccagcttttcccgtcctccgccttcttctgcctgcttgcgtttcgtgtataaatgatccatgtgttcattcatgctcattgtgttggtctcctttcggttcacaaagctctacaagaacaccgtttgtttcccgaggggaaataaacgcgatctttttcccgttcgctccctgtcttggaaacctgtcaatcaattgaacatgctggtcagacaatgcttgaagctgttcagataggccgttgcacaaaaacgcaatatgatgcagtccctgccctttcttctccaaaaataaatggacggggctgtcagctgtcaacggctctatcagctcaagtttgacgctaccagcttgaaaaaaagcaacattcaccttttgctcttcaaccgtttcttgatgaagaaatgcaagccccaatacattttcataaaagcttcttgcatcttttatcgaaaaaacggctatcccgatatggtcaagcctgttcattttcatccctgctttcgctaatagatatcgcttgtccgcccattcaaaacacgctaaaatatagacagattgtttaaggagtgaaaatcatgtctcaaaaactgatgaaaagcgttttgatcgtgattttgggagtttttattctttcaactgtactctcaggaatcgtcatgtttctataacgataaaaaagcaggcgccttattcaatgggaatatcctgcttttttatcagagctttatgctcgatggcaatctcctcaaaagagcggttgtcgtccgtgatcagcactctcgttcctactggtatcgtttgaaacaaatgaacaacctcatcgttatgcatacgtatacagccgttagacacaaattttcctactgattcctctcggtttgtcccatgaattccataaatccgcccgtccgttcctttcgcgtcaaatccgatccatctggccccaagcgggttatcaggagatcccccttcaatatttttctttctgtagtaaggattttccgcttttaccgttaccgaaaactctccttcaggcgtcaaatcatctgtttttccagtcgccacactatacacgccttctactttgttgtcgagaataacagcaagttcatttgttcgcttgttgacaataacatacggatcacctggcagcggattttcgccgagcggccaaatcggtgaaatcatcattaaaatcgaacataagaaaaaacgcataagctcctcctttttcattaggttgaccaatgaaggaagagctcatgcgaatcatccgagtgatttttgcgcttttattcctttaaaataacttttaatcactaaatattgttccatttcgccgagaagatggaagagagcggccctcgcttcaaattcctctctagtcgcaggaagcggcatctcctcaaattcttttctcatgtcagcaagtcttttcagaaatttgtacgctgtattcccagggtgtatcgcctcccgcaaatcatgaataaattcagcgatcatttttccctgatctaccgtgatggagatcgatgtcactttagggagaaggcgttcgataatttcaaattgcttttctctcattttaaaataatgataatgcagattttcgtaacgcaaaatgtggttttgcacatctcgatatgccaggtttttagcctccgtaatgagctggtgcgtttccggaatttcttttcctgaccaatcttgctcaccagttaacaaataccgttcgatttctgcaaaaatgacagcaaagttatcctctatctttttgcggtaggcaatcagtttccggtcaagactaggcatatacaagttcatcaatagagcgacgccgatgccaaccgtaatcagctgaacttcattccagatgaaagcaagcgtaatgccgccggacatgtataaatgaaggataataacggaactggtgacgataccctcgttaatttttaacagaaccgttatcggaatgaatatcaaaagaagcgctccgatcacaaacgggtggtagccaataagctcaaaaaagagataagaaaaaacaattgccagacagcatgccgcaaagcgggcccatgaggcctgaagcgaccgtttttgtgtgatttgtatgcacaaaatggtgatgattcctgctgatgcgaagttttgcaaatgcaataactggcttatataaatagccaaagctgttccaagcgcggtctttattgtgcggtaaccaattttaaacatgtcggactccatttctatttgtttcttcaataaaaaagaagaggcggccagccttcttcttttttatattctataatattttctctaaaaagtcctgcgctcttttggattttggcgacataaaaaattccttcggattgccgtcttcgacaatcattccttggtccataaacagcacacggtctgccacttcttttgcgaagcccatttcatgtgtgacaatcaccatggtcatgccggtttcgaccagctctttcatcacctgtagcacttctttgaccatctctggatcaagggcggaggtcggctcgtcaaacagcatgatgtccggattcatcgcaagagccctggcaatcgcgacacgctgtttttgtccgccagacaaacggtttggatagtcatttcgcttttcaaacaaaccgactttgcggagcaggtcctcagctttctcctgtgcagcctgttttgattctttttttacattgacaggcgcgtacatgatgttttcgagaaccgttttgtgcggaaagagatgaaaatgctgaaaaaccatcccgatgttttcccggacctttaatgtgttggttttcggcttcgtaatctctgtgtcttttattgtaatggttccgccgttaggcttttccaacaggtttaaacagcgtaagaacgttgatttgcctgagcctgaaggaccgatcacggcaacaacctcaccctcagcgattgttgttgaaatgttttttaatacttcgtgtttcccaaatgattttgacagcttttcaaccttaatcattggatttcagcttcctttctacagccttgccgataaacgttaaaatcaggacaagcacataataaatcaatcccgcgataatgagcggctcaaggtaattgtaagtggcggcgccagcttgatatgcgcgtctcatgacatcaccaagcccgatgacggtgacgatcgccgattcttttgttaacgtaattaattcattcacaattgcaggtgatatatttttgaaggcctgcggcagcagcagatccttcatcatttttccatacgggacaccgagtgcaacagcagcttctttttgccctttatcaatggcattgattccggctctgataatttccgatacataagcggcggaattcaaagacaatgcgacaaccgcagcccaaaactggtcaatttgaaatccgagcagctgaggaaggccaaaatagacaatcataagctgcagcactaaaggcgtgcctcggaacactgatgtataaaaatcagcgatccagataaacgggcggaatgtgctgatcttgcataagcttagcacaataccgagtataagtccgataatagcagatacaacaacaatttttaatgtaattgccaagccttctaatataaaaggaatttgggggatcgttgctgaaaaatccaaattcatagcctttgtctccttttcttacaggaaaaaagtttcctattcaataaaaaggctcaacgaaaaagttgagccgcttttttttacttctcgccagtgaaccattttttcttcaatttctcaagctctccgttatcttccatttccttgagcgctttattgaatttgtctgtcagttcactgtcctttctgaaagcaattgctgaaccggcttcttccgctttcgcctcaggaatcacaaagccttgcaggtcatcatttgatttgaaatacccttctgcaacaatgtcttcaataatcgcggcatcgaaacggtcagatttgatttcctgcaccaaatcagaaattctgttgcggtcttctgttttaaaaccatattccggagaaagctctttccccttctcttcctgaatagagccaagctgaacgccaactgtttttcctttcaggtctttcaaagattgaatgccgctgtcttttttgctgacaatcatatggttcgctgtgtaatacacatcggaaaaatcaacttgttttttacgctcaggcgttggtgtcattcctgacagaacgagatccacctgttttgatttaagcgctgtaattaagctgttgaagtccatatcctgcacttcaatttcatagcctgccttctttgccagagcttttgccagctctacatcaaagccgacaatattatctccttctttatattcaaacggtttgtaatccgccgaagtacccataattaattttttctttccgctttctgaacctgaattgcttgagccgcacgcagttaatgcaaaggtgatgcaagcagctacaagtaataagagccattttttcatgatccatttcccccgtattcattacttttggtgtatttgaatatttattcgttaatttgtattttaaacagtttctcatttttatgcaatactatttttaaaaattatctttaagcttatctttccagtgatctcttctgatattactagataaaaattaaatcgctgtacaatccgattgaataatcccttaatatttattcatatatccttagaaatttatgcacaaaaaaacccgggctgctttgagcatccgggttgttcgtcttatacttcttcacaatattcttcaaaggcttcctgcagctttgccactacggccatcggctcatggccttcaatttcatgacgctctaccattttcatgatctttccgtctttcaaaatcgcaaaggacggagaagatggcggataaccttcaaaatagtcacgcgcacgcgctgtcgcttctttatcctgtccggcaaaaacggtgacgagctgatcaggtcttttatcatagtgaacggaatggtaggctgccggtcttgcaattcctccggcgcatccgcaaacagagtttaccatgacgagcgtcgttccttttttcgtaagtgcctcatccacctcttcggctgttttaagctcggtgtatccggcagctgttatttcttgtctcgcttggcggacaatatcattcataaataaattaaagtccatgttcaatgaagacctctcctttttcatcatctgttcttatgatagcaaggaaacgtccatatcggcaaatgactttgcttcgccgtgcactttttttgctcttcgtttactgcttacagaaaaaggggattatataactagaagtaaaataaaggagcagttgtatatgagccacaggaaagcgttactgattcataacggaaatgccggcaacaaaaatatagaaaaagcacttggtgctgtggtgccggttttatctcaccatttagatgaggtaattattaaacagacaaagaaaaaggatgatgcgtatcatttttgccgatccattgatgattctgtcgacaccgtcttcattctcggcggcgacggcacgatccatcaatgcataaatgctatcagcgctctagaaagaaaacccgcggtcggaattttgcccggcggcacgtgcaacgacttttcaagagtgcttggcatccctcaaaatcttgcaaaggctgcggaagcacttatgtcaggaaaaaaaaccagcgtagacgtatgtcagatgaatgaccgttattttttgaatttctgggggatcggcttaattgcagaaacgtcgaatcaaatcaacgaaacggaaaaagcattattgggaaaaatcagctattttacaagtgccttgcgaaccgtctcatccgctgcatcgtttccgatgacattaaaaattgatggagaagaaattaaagaagaagccgttatgctgcttgtgatgaatggccaatatattggaacgaatcgaattcctctccccgatgccagtattgaagatggcttacttgatgttctcatatgccgcaataccaacctcaccgcgttgcgggagctgatgagcatggaacagggttcaattgatcgttttaccggagagttgtcctatgtccaggcttcccgtatcgagattgaaacagacactgccaaaaaggcggatatggatggagaagtttatacacatacacccgcagtcattcaggtcctgccgcagcatatcgacatgcttgttcccgcaaatgaataactgtcatagggctttagaaagattttgcaaatccgttgactctcccctaggaggaggtcttacagtataagggatacacacttgaaaaaggggaagtcatatggagaagaaaaatattaccttaactatattattaaccaatttatttattgcttttttggggatcgggcttgtgattccagtaacgccgaccattatgaatgaattgcatttatcggggaccgcggtcggctatatggttgcctgcttcgctattacacagctcattgtctcaccaatagccggacgatgggttgatcgcttcgggcgcaagatcatgatcataatcggcctgttgttctttagtgtgtcggagtttttgttcggcattggaaaaacagttgagatgttatttatctcccgtatgctgggcggtatcagcgcagccttcattatgcccggggtcacggcttttattgcagatatcacgaccattaaaacacggccaaaagcgctcggttatatgtcagccgctatttcaacaggatttattatcggccccggcatcgggggatttttagcagaagtccattcccggctgccttttttctttgcggcagcttttgcactgttagcagccattttatcaatcctcacgctgcgcgagccggaacgaaaccctgaaaatcaggaaataaaaggacagaagacaggctttaaacgaatttttgcccccatgtatttcatagcttttctcattatcttaatttcgtcttttggtttagcatcatttgaatctttatttgcattattcgtggatcataaattcggatttacggccagcgacattgccattatgattacaggaggagcgattgttggcgccattacgcaagtcgtcttattcgaccgcttcacaagatggtttggcgaaatccatttaattcggtacagcttaattctctctacgagtctggtattcttgctgacaacagtacattcatatgttgcgattctgttggtgacagtcaccgtatttgtcggatttgatctcatgcggcctgcggtaacgacttacctgtcaaagattgcgggaaatgaacaggggtttgccggcggtatgaattcaatgtttacaagtatcggcaatgtattcgggcctattatcggcggaatgctgttcgatattgatgtaaactatcccttctactttgcaacggtcaccttagccatagggattgcactgaccattgcttggaaagcgcctgcacatcttaaagccagcacgtgataagaagcgcattctttgtgtactgcaaagatgcgcttcttctttatactgatgatagaaggagtgatggcatgaaggaatcgtattactcaattggggaagtatcaaaactggcaaacgtgtcgataaaagcgctccgttattacgataaaattgatttatttaaacccgcctacgtcgacccggataccagctaccgctattatacagattctcagctcattcatctggatttgatcaaatcattgaaatatatcggcacacctttagaagagatgaaaaaagcacaggacttagagatggaagaactgtttgctttttataccgagcaggagaggcaaatcagggagaaattagactttttatcagcactggagcagaccatttcattggtgaaaaagcggatgaaacggcagatggaatatcccgcgctcggtgaggtgtttgttttagatgaagaagaaatacggatcattcagacagaggcagaaggaatcgggcctgaaaacgtgctcaacgcctcctacagcaaattaaaaaaatttatcgagtcagcagatggatttacgaacaatagctacggcgctactttctcttttcagccctacaccagcattgatgaaatgacttaccgtcatattttcacgcctgtattgacgaataaacagatttcatcaattacgtcggatatggaaatcacaacaatccctaaagggaggtatgcgtgtatcgcgtataatttttcgcctgaacattattttctcaacttacagaagcttatcaaatatatcgcggaccgccaattaacagttgtcagtgatgtatacgagttaatcataccgattcattactccccgaaaaaacaagaagaatatcgagtcgaaatgaaaatacggatcgctgaataataaagcatagaaaaagagcattttttgaaacaaaacttcaaaaaatgctctttttgcttatttagtaaacagatgtcttctcgtcaatcgattctaaaatttgtttcactcgtccgaggaatcgtccgcacacgagaccgtcaagcactctgtgatctaatgacaggcacagattaaccatgtctctgacagcaatcatgccattgtccatgacaaccgggcgtttgacgatggattctacttgaagaatcgcagcctgagggtagttgataatgcccattgactgaacagagccgaacgaacctgtgttgttgacggtaaacgtgcctccctgcatgtcatctgcagtgagttttccgtctcttacttttttagctaggccggtaatgtctttcgcaatgcctttaattgttttttcatcagcgtttttaatcaccggaacaaataaagaatcctctgtggcaactgcaattgaaatattgatatcctttttctgaataattttgtcccccgcccacatgctattcatttgcgggaattcttttaacgcctgagcgaccgcttttacaaaaaaggcgaagaacgttaaattaaagccttctgtcttcttaaaggaatcttttatactgttgcgatatgcaaccatatttgtgacgtcgacttccatcatcgtccaagcatgcggaatttctgttttgcttcgcttcatattggaagcaattgcttttcttacacctgtgacagggatttctttatcaccggctgcagacgcaggatatgacgtctcttcttttggctcaggttttgatgcagacttcggtgcaggagctgctgttttcggctcctcaggattctgttcttgcacgccgcctgtttcaattaagcgctgaatatcttttcgtgtgatgcgcccgccggcacctgttcctgttacttgttcaagatcaatgctgtgctctccggccaaacggagtacagctggcgagtagcgctttttattgggctgatcagctgcttcggtactttttgcagcaggcgtctcagcggcttttgaagcagctggctgttcttgtttttgttcagccggattcgcgccttctgtttcaattttgcaaatcacttctccgacttgcagggtttggccttcttctcccacaagctctgttatcgtaccagtaaaagaagacggaacctctgcatttaccttatctgtcatgacttccgcgatcggatcgtatttgttcactttatcaccgggggcgacaagccatttgctgatcgtcccctctgttacgctttctccaagctgcggcatcgtcatttgttcaattgccatgattgtatcctcccttacgtctttaaaactccgctaattctctcatcgccgcttccactttatcagggttgaccataaagtatttttccattgtcggcgcataaggcatagccggaatatcaggacctgcaagccgtttgatcggcgcgtctaagtcgaacagacaatgctcggatataattgcggctacttcgctcatgatgctgccttcttttgtatcttctgtgaccaaaagaacctttccagttttggacgcagcttcgataatcgcttctttatcaagcgggtaaactgttcttaaatccaccacatgcgctgaaatgccatctttttcgagacgttctgcagcttgtaaggcaaagtggacacacagaccgtatgtgatcactgtgatgtcgtcgccttcccgttttacgtcagccttgccgattggcaggacataatcatcagccggaacctctccctttatcagacggtacgcccgcttgtgctcaaaaaacagcacggggtcttcgtcacgaactgcggcttttaagagccctttcgcgtcatatggtgttgatggcatgacaattttcagtccgggctggttggcgaaaattgcttcgactgattgagaatgatacaaggctccgtgcacgcctccgccgtatggcgctctgacgacaatcggacaactccagtcattgttgctgcggtagcgaattttagctgcttcagaaataatttggttgactgccggcataatgaaatcagcaaactgcatttcagcaatcggtctcattccgtacattgccgctccgataccgactcctgcgatcgcagattcagcaagcggcgtatccatcacgcgctcttccccaaattgttcatagagtccggctgtcgctttaaacacaccgccttttcttcctacatcttccccaaggacgaagacgcgagaatctcgttccatttcttctttcatcgccaaattgattgcatcaatatatgacattactgacatttgttcttcctccctacttcgcatacacataatcaagcgctgactcaggagctgcataaggggcgttctccgcttcatccgtcgcttcatttacgattgccataatttcatccagcatggtttgttctatctcatcggacagcaggcctgtttcctttaagtaagcttgataagtaagcaggggatcactttttttcgcttcctctacttcttcacgccctctgtagctgctgtcatcgtcatcactggaatgtggtgtaaggcggtaagaaatcgtttcaattaatgtcgggccttctcctctgcgtgccctttcgcgtgcttctttaaccgcttgataaacttccagcgggtcatttccattcacagttacgccaggcatcccatagcctatggcacggtcggaaatgttctcacatgcgacttgcttatcgtaaggcactgagattgcgtatttgttgttttcacacataaaaataaccggcagcttatggacagcggcaaagtttgccccttcatggaaatcgccttggtttgaagacccttccccgaatgtaacaaaggctgcgatatcctttttctccatacgtcccgcaagcgcaataccgactgcgtgcggcacttgcgttgtaaccggagatgatcccgtcacaatgcggtttttcttttgtccgaaatgtcctggcatctggcggcctcctgagttcggatctgctgcttttgcaaacccggacatcattaagtcctttgctgtcatgccaaacgcgagcacgacacccatgtctctgtagtacggcaatacataatccatttcacggtcaagtgcgaaagccgctcctacctgtgctgcttcctgtccttgacaagagattacaaatggaattttgccagaacggtttaacagccacattctttcatcgatttttcttgctaacagcatggttctatacatatcaacggcttcctgatcagtcagccctagtgcttgatgtcggtttatactcattcaagcccctcctttatgcttttaaaaatgaatggctttgccatctgcggcaagcgctgcttctccaattgcttcagaaagcgttggatgcgggtgaatcgtttgcccgacctcccacggcgttgcgtccagcactttggcaagacccgcttcagaaatcatgtcggtgacatgcgggccgatcatatgaacgccgagaatatcatctgtatctcggtccgccacgattttgacaaaaccgtcgctttcaccgtatacaagcgcttttccaatcgccataaatgggaacttgccgattttgacattatgcccgttcgcctttgcttcgtcttctgttaagccgacactggcagcttcagggcttgagtaaatgcacttcggcacaagcgtcggatcaagcggatgcggattgagacctgcaaaatgctcaacagcaataattccctcatgtgaagcaacgtgagctaactgcaggccaccgattacgtctccgattgcataaatatgagattccttcgtttggcagctttcattgactgaaatcatgccattttcagtaacaatatcggtgttctctaggccgatgccttcgatatttgcctgtctgccgatggaaacaagcattttctcagcagagtaggtaacggtttctccgtctttttccgcttgtatgctgatatcgtctgatgtttttgtcattgtgtcaggcagcacttttgcccctgttatgaactggatgccttttttcttaagaagactttccatttcttttgaaatctctagatcttcagtcggcaatatgcgatccgcgtattcaataaccgttaccttcacaccaaaatcatgaagcatagacgcccattcgataccgataacccctccgccgacaatgatgattgattgtggcagctcctccatttggagcgcctcatctgaagtcagtacagacttaccgtccgcttcaagacccggaagcattctcggtcttgatcctgttgcaatgatcacttgtttcgggatcagcatgtcattttcttcgccatttccccgctcaacagaaattgttcccggcagcggagagaagattgacggtccaagaatacgtccatatccggtgtacacgtcaatttttccttttttcattaaatgatttacacccgctgcaagcttatcaacaacggcttgcttacgctgctgcactttttcaaagttgagggacacgccagccgtttccaccccgaattgatcggcttcacgagctgtccggtatacctctgcgcttctaagcagcgctttactcgggatacagcctttatgcagacatgttcctccgagtttttccttttccacaacggctgtttttaagccgagctgagcggctctgatggccgcaacataaccgccggtaccgccgcccagaatgactacgtcatactcagttgccatggtgactcactcctgtctgtctattcaatacgatattgtttggattgctcttcgccctgcaatactctgagcgccccttgggcaagagactgcagttcattttcacccggatagactaaaacgtctgaaatccaatctatgtatgatctgatagcagaaacaaagcttttgccgtacgcaaggcctcccgtcagcacaatcgcttcaacttctccttttaacgctgcgctggctgccccgatttcctttgctacctgatatgccatggcatcataaatgaagcgggctttttcatcgcccccttgaatcatctgttccacttttactgcatcatttgtaccgagatagcctaaaagtccgccggtgccaacaagctttttcatgatttcttcttttgtatattcccctgaaaaacatagatcaacaagatctcccgcaggcactgttcctgctcgttcaggactgaatggtccctcgccgtgcaggccgttattgacatctaccactcgcccgcggtcatggacgccaattgtaatacctccgcccatatgggtaataatcattttcatgttctcatatcgtttgccaagagaggctgccgctttacgagcgacagctttttggtttaacgcatggaaaatgcttttccgttcaatttcaggcatgcctgaaactttcgcaagcactgacatttcgtctacgacaacagggtcgacgatatacgaagggatattcaggccgtcagcgatttcccgcgcgataatgccgccgagattagaagcatgctgaccggcgtaaccgcttttcaagtcctcaatcatgtcatcattcactacgtaggtcccgccttcaattggccggagaaggccgcctcttgcgcagactgcatcaaacttcgagatattgattccctgttcatgaagcgtttcgagaatatggtttttacgaaattcatactgatcaataattcggtcaaatcgctgcagctcttctatgttgtgtctcaatgttttttcaaaaatgcttctttcattatgaaaaacaccgattttcgttgaagttgagcctggattaattgtgagaatgcgtttttcgtcatgtagcactttcataacctccagatcaatttcttaacgtctgcttaatacactgtggccgttttgcaaaaactggcttcttgagcggcgcatgcgttcaatccgttcctctgccaagcggtcagccgctaaatatgcaggaatgccgtcacgctgagaaatctcaagtacacgctcgatattgccgtaaatgccttcaacttttttcaatgcacgttctgcattatagccgtaaagctcatctgccacgttgatgacaccgcccgcgttaatcacgtaatccggtgcataaacgatgcccatttcgtgaatttgatcaccatggcgtgtctcttttaattggttgttagccgcacctgcgatcactttcgccttcagctgtttaatggtgtcgtcgttaatagtcgcaccaagggcacatggcgcataaatatcgcagtcttgtgaataaatatcatcaggatctaccgcccgggcgccaaaatcttcaactgcacgctgtacagattgtttgttgatatccgtaacgattaagtttgctccttcttcatgcaggtggcggcaaaggttataggctacgttcccaacaccctgtacagcaatggtttttccttcaagagagtcggttccgaaagcagctttagctgctgccttcattcctctgtacaccccgtacgctgtgactggggacggatttccagaagagccgaaagcaggagaaatccctgtaacgtagtctgtttcatcatgaatgatatccatatcctcgaccgttgtacccacatcttcagccgtgatgtatctgccattcagcccttgaatatagcggccaaacgcgcggaacatttcttcatttttgtctttgcgcggatcgccgataatgactgtttttccgccgccaaggtttaagcctgccgccgcgttcttataggtcatgcctctagccaatctgagcgcatcttcaattgccgcttcttcattttcatatgtccacattctcgttccgccaagcgccggaccaagcgttgtatcatgaatcgcgataatcgcttttaatccagattgttcatcctggcagaataccaattgttcgtaatcgtatttctccatatatttaaaaagttccatgttcgttcctcctaatgtgtgtattcttcagatgcgcatattgccagcgcaatggaatacagtttattttcagcagagtccgctctgcttgttaaagcaatcggtgcttttgctcctgtaatgacagccgccacgctggccttggcaaaataaatcagtgatttatataaaatattgccggcctcaattgttgggacgagaaggatatctgcgttgcccgctacgtctcccgaaatttttttctgagccgcggcaatttgtgaaactgcgttatccaaagcaagcggtccatcaacaatgcagcctttgatctggccccttttgtacatttgagctagagcagctgcattcacggttgcttccatttttgggttcaccgtttcgaccgctgcaagagcagctgcttttggcatattgttccccactgcatgggccacatgaacggcattttgcaaaatctgccgaagctcttccagcgaaggagcaatattcattgccgaatctgtcacaaacatcagccggtcaaaatccggtatatcgaatacagccacgtgagaaaggacacttgctgaccgaagcccctcctgtctgttcaataccgctttaagcaaaacagaagtcggcacattgcctttcattaaaacgtccgctgttttatgatgcacagcacgaaccgctaatttcgccgattcctcaggagtatcggcatggacgatttccacttgatgcccttgcatggatgatgtcagctcgttcagttttgtgctgtcgcccgttaacaagaaacgggcagataggtgctcggctgccagctttacagcccggatcacttcctcatcctcagcatgagcaaccgcaatggtcttatttttgtgtatcgacgctttgccgattaaatctttcagcttcatctgttaccacctttcttgtttcgactccgccttttattatgcaagttccatgccagctcttaagggtgctgtcataccaggtatattgaaacattcgtgcagatgtttgcgtttattctgcaaattattgcatgccttcatttgcaaggccatatttatccattttgtaatataagttccgaatgctgacaccgagagcttttgctgtttttgtccggttaaaatgatgcttttcgagcgtttgctggatcaaatgtgcttcaaatttttctactgcgacagacagcttttcgccttcaatatccggaaaatcaaaacctgttccctgatctgtgtcattttctttttgctcaagttcgaatacaggcaagtgatctttttcaatccattccatatgcggattcagaaaaatcatggctcgtccaaggacattttcaagctcccggacattcccaggccaatggtaggcagataaggcgcgcaaggcttgttgtgagagcccttttacattcctgccgtaatcccggttgatcttttggataagtctgacgctcaatgcttcaatgtcctccaaccgctgccgcaaaggcgggatggagatcggatagcgattgatccggtaatacaggtcttcccggaatgttccgtccgccatcgccttttcaatatttacatttgtcgccgcaatcactctgacgttgacagggatcgctttcgtgccgcccactctgacgatttccttttcttgaaggacgcgtagcaatttggcctgcatattttgtgtcagctcaccgatttcatctaagaaaatactgccgttatttgcttcctcaaataaaccctttttaccgccgcgtttcgctcctgaaaatgcaccatcctcatagccgaacaattctgattcgagcaggttttcagaaagggctgcacaattcacgcgaataaatttattgtatttccggtcactttcgttatggatggcatgggcgaacagttcttttcctgttcctgattccccgcgcagcaagatggttgccggtgttttcgcaccgagcttcgcctgctcaagcgcaaccagcatttgctcgcttttgccaataatgtcgtcaaacgtgtatttcgcttcaagcgtgcgaataatttgtctggcgcgattaagctccgctgtcagcattttaatttcggaaacatcgtgaatcacgccgacgctgcctttcaaaatcccgtccacaatcaccggtgctacattaacgatgacctctttttcattcgggccgaccttcattctgacaccgcggacaggacgtcttgtttcaagcacctttaaatgcatgctttcgccttcggaaatatcagtgtttgcaggcttgccgatgacttctttttcagaaagccccgtcattttcgtatacgctttattgattagcaggccgatgccgttttcatcaacgacagaaatcgcctcatcggaggattgaataatcgcctccagcatcgtacggacctgctttaagttggtcacttcctctgccagctcgaccgcatcagtgatatctttaaacacacaaagagcaccgagcagacgtccgccttcatcaataatcggcagtcttgtggtcacaatttgcaaatgatcgcctaacagctgcttctggttgtattcaggcactcttgtttttaaaatccgcggcatcttcgtgctcggaatcacttcttttattgggcgcccaatgacttcctcacgtttttttccgaccattttttcggccatatggttaaagagaatgatttcttcattgatatcaataaaaatcattccatcatgggtggaattaaaaattctgtcatatttataggtttgctcttttagcatttgaatcaggtgctgcttttcttccatcagctgaaaaacgatgtatgccatttttcccggcatgacaatggtatcttcatgctttctttgaaggagctcgtcaaacacggcttgatcgccggtggtatgaatgacgatatccggtttttgttgtatgtaaggtttccaatcagatgatacggcaatcccatacttttctgcttctttcaatcccggcgcctcggggtctttgtcaactacggcaatgatatctatgatggctgttttaatcagaatatgtaataacgccgttccccttttgccggcacctactatcagtaccttttgcatcccgatacccctttgtatgaaaaaatttgcacacctatttattccgttgcaataatttgcacaaccctatgttaccacgttttcttctcttgacaaaatattttttccgctggacaataaaggaaatgaaaagataaaggggttttctgaagatgagccgacttcttgcgcttttaatattagtcatccccggggctatttctgctttaggcattaaactgatgagagatacacttttcggccatacaatcaagccattttcagctctttggctccaagggttgtcaggattcatcttttttgcgatcggcctctatgtgctggccgggttcattttatacagagacagaaaacgcaatcaagtcagctcgcgattcagaaaacgatagctgaaaaaaagccggagaatgctccggctttttttgttgcattattcgtcaggcaaaacggtcttggcaatcgttttgtctaacgcttcatagtcataataagaaatcgtatcgtacagttcttttcgtgtctgcatatcatgaagtccttctttttgtgagccgtgctccttcatcaaaccaaacatccgctcacaagcttttgccgccgctcgaagcgaggtgacaggatatatcaccatgtgaaaccccatatcttcgaattcatcggcacgataatatggcgttttcccaaattcagtcatattcgcaaggagcggaacggggatacgctcagcaaactggcggaattcattctccgcctgtagcgcttccgggaaaattgcgtccgctcccgcctcaatgtaagcctctgaacgttttattgcggcatcaagcccttcctgcgccctggcatcagtacgggcaacaacaataagggagggtgccgcttgtttaatggcttttattttttgcgccatttcctttatcggaactagctgtttgccatttaaatgtccgcatttttttgggagctgctggtcttctatttgaacggctgctacccttgcttcaagcatctcccgggctgttcgggcggcatttaagacaccgccaaatcccgtatcgatatccacaagcagaggcagatcagctgcacgtacaagatctttggcccgttcagctatctctgccgatgtgatgatccctaaatcaggcagccccctgctggctgtataggcagcaccggacaaataaatagcagaaaaaccggcttctttcgcaagcaaagcggccatcccgtcatgggcgccgggaatttgaagaatgtccggtgctgacatcagcttgcggaaacgcccggcaagctcctcttgtgacgattgcttattgacgatccacgacatgaaacaaatcccccttttacatgcagaacatgtctacgaattcatttacgcgcatcgtttgtaatgtctcatagctggtacagcgctcataaatgtgtttgtgctgtttatcaggaaaatgggttttgagattgtcagaaaacttttccagcagtttcggcactgcttcctctcttcgaaaacgatggccgaggggaaactcacattccaccatttccgtgctcgttccgtctttaaaatgaacctgaacggcatttgagatggaacgtttatcaggttttaaataatcctcggtatatgttttattttcagtcacttccattttatcacgaagtttatctattctcggatcactcgctgtttcagcttcataatgctgtgcggtgatatcaccaaaaagcaaaccgattgctgtaatgtattggagacagtgatcacggtctgccggattgtggagcgggccttttttatcaatgatacggatagcggattcatgcgttctgatgacaactcggtcaatctcgtcaatccggttctttacctgcgggtgaagaatgacggcgcactccgccgctgtctgggcgtgaaattccgcaggataagacactttaaataacacattttccatgacataagcgtcaagcggacgggcaagcttgatctctttcttattgaataaaacgtcttggaacccccaacccggtgcactcagggctgtcggataacccatttccccttttaacgacatcagcgccaaatgaacacctctgctcgttgcatctcctgccgcccatgatttacgcgagcctgtattcggtgaatggcggtatgtcctcaatgctgcattgtcaatccatgcattcgaaagcgcatttttgatttcttctcttccgccgcccaaaagctttgccgcaacagcggttgtcgcaactttgacaaacagcacatggtcaaggccaactcgatttaagctgttttctaacgccagcacaccttggatctcgtgtgctttgatcatcatctcaagtacgtcgcgtactgttaacggctcttttccttcagacagcctcactcttgatacataatcagcagcggcaaggattcctcccaagttatcggatggatgcccccactccgccgccagccacgtatcgttgtaatcgagccagcgaatcatgcagccgatattaaacgctgccctcacaggatcgagaacatatgacgttcccggcactttgcttccattcggcacagtcgttcctggaacaatcgggccaagcagctttgtgcattccggataccgtagcgccaagatcccgcagcccagggtatccagcaatacatgccccgctgttgtatacgcttcggcactagtaatctctttctcaagcacatagtctgtgatttcttcgataacacgatccgttttcggcattctaccagttcctttcatggttttgtttgatatcgcgggcccatgtaactgacgcggggacggaagagccgattattggcatgctgttcgatcacatgggcgcataaaccggacgttctcgcgctgaaaaagatcggcgtatataaaggaatcggtatgccgagcatccaatacactggggcagcatagtaatccaaattcgggtaaagccctttttccttctccatcagccgctcacccgcttcgcacatctcatataaacgatggtcaccggctttatcgcataattgctgcagcgcctctttcatcatgagtgctctcgggtccatttttttcatatacacccggtggccgaagcccatgattttttcttttcttttcagttttgtttgcaaaagctgctcaaaatcagatgtcgtttttgcctccaaaagcaaatacatcacagcttcgtttgctcctccgtgaagattccctttcagggaagcgacagccccagtcaaagccccataaagatctgaatgtgtagatgcaatgaccctggccgcaaaggttgaattcggcatctcatgctcactgtacaggacgagcgaccggtcaaaaatctgttcttccaatgaagacggcaatttccctgtcatcatgtagagaaaattcgcactgtaggatagggtttgaagcggaagaatcggttctttcttattaatgatcctgtagctggcagcagtgagggcaggcattttcccaagaagctgataggcgcgttctttgtttgcggaaggagaccgatcatcaatttgccgatcatagccagcaagtgccgacaggccggtacgcagactatccattggatgagtgtcctcagggagcagctcaagcagacggagatgatcagcaggcaggcttgaggcactgattattttacgttccagcgtctccatttcactttcttctggcagcctgccctccagcaataaatggacaagctccagatagctttttgtttcagaaagctctattaaatcatagcctcttatcaaaatctggctggactgcgtgtcaagataagaaatatgagtttctgccgcaatcacaccgtccaaccctggagaatattgctgtttctcctccatatcctcaacctccgtttttgcgttttttgtctatcaggttccgccaagcaaatacttggaaataatcagtctttgaatctcgttcgtcccttcataaatttgcgtcacctttgcatcgcgaagcaggcgctcaactggataatccttcatatagccatatcccccataaatttgaacggcgtctaacgccgcctttacggctgcatcggaagcaaattgtttagccatagacgcttcttttccacagtttaggccgcggttatgaaggtctgcagcgtggtagacaagatgtcttgccgcctcagctctagtcgccatatcagccagcttaaatgaaatggcttgattggctgcgatcggccttccaaattgcactcgctgcttcgcataatcaacggcatgctcaagagccgcctctgcaattccgagggcctgtgccgcaatgccgatccggccgacatttaaattcgccatggcaatgtgaaagccatccccctctttgccaagcaaattggcttcaggcacttctgcattatcaaaaatcagttccgtagtattggagccataaagccccagctttctttctttttttccaacggtaaaaccgggtgtgtttttttcaacaataaaagccgaaatcccgtgcctgccttgatctggagctgttaaagcaaatgtgatatagatatcagctgctccgccattcgttatgaatattttcgatccgtttaatagatatttgccgttctttttgattgctgttgtgcggaggctcccggcatccgaccccgagtgaggctccgttagtgcaaatgcgcccaaatggtctcctgacgcgagctttggtatatatttcatcttctgttcttcgttgccgaagtacagaatcggattcgtgccgactgaggtatgaacggagagaatcacgccgacagccgcgctgattctagaaatctcatgaatcgccaaaatataagaaacaacgtctgccccgacaccgccgtactgttccggcaccggtattcccatcaggccgtgttcgcccatttttttgatcagctgaaagggaaattcgtccgttttctccatgatttccgcagcgggagcaatttcttttcgtgcaaaatcacgcaccatttttcgcatcatgacttgctcttgggttacatgcaactcggccacccccggatggaatagacttcaggaagtcctctcctcatagtcataaaaaccgcgtccgctctttttgccaagccagcctgctttgacatacttgcggagcagcgggcatggacggtatttggaatcgccaaggcctgagtgaaggacttccataattgataaacacgtatccagtccgataaaatccgctaatgcaagcggacccatcggatgattcatgcccagcttcatcacttcatctattgcctccggcttcgccactccctcatacacgcaatagatggcttcattaatcattggaagaagcacacggttggaaacaaacccaggaaaatcattgacttctaccgctgttttccccatcttttccgctaatgccataacatctaaggccgtttcttctgatgtagccaagcctcgaatcacttctaccagcttcattacagggacgggattcataaaatgcatgccaataacccgttgaggccggtttgttacagcagcgatttctgtaataggcaaggaagatgtattgctggccaaaatcgtatgaggcgggcaaatgcgatcaagtgttttaaacatctcagtttttgccgccatgttttctgcgatagcctcaatcacaatgtccgcatgctctgcctcctcaagcgtttgagaaatcgaaatgcggttgattacgctcttcacttccgtctcggtcctttttcctttctcagcatcacgggccagctgtttcttcagccgtttcaatcctgcctccgcggcctctggattcacatcatacatccgcacataaaagcccgcgccggcagctgtttgagcaattccgcttcccatctgacctgcgccagctaccatgatttgtttgatttccattcaaatcccctttttcatcatgttttaatgaacctgcactaagacggcgtctccctgtgctgccccgctgcaaatagcggcaacgcccagaccccctccccggcgctttaattcataaacaagcgtcatgagaattctcgccccgctcgcgccgatcgggtggccgagcgcgatcgcaccgccattcacatttactttttcaagatcgaaacctacgattttttcacatgtcaaaacaactgaagcaaaagcttcatttacttcaaacaagtcaatatcttggacagttaaaccattctttttcaggagcttgttaatagcaaaccccggcgctgccgccagctcgtgcgctggcattcccgtagttgaaaaaccaagaattgtagccagaggccgtttgccaagctcagcagctttttcctcagacatcagcacgaacgcgccggctccgtcattgactccaggagcattgccggctgtgatagaaccgtcacttgcataaatcggagcaagttttgcgagctgatccagacttgtgtcacggcgaatcgcttcatctttatcaacaacgtttggttttccttttcgaccgatccagttgacgggaacaatttcatcctgaaacttcccttcatcggcggccttagctgcccttgcatgacttctcaacgcccattcgtcctgctctcttcgtgagattgcatattccttggcagctgtatttccgtgaacagccatgtgcacctcgtcaaatgcgcacgttaatccgtcatacaccattaagtccctaagctcgccgtcccccatccgtgctccccagcgcccggcgggaacggcatacggaatattgctcatgctttccatcccccccgcaacaagtatgtccgcatcctgcgcccgaatcatttgatcacataaagtgacagcgcgaaggccggaagcacagactttattcagtgtttctgacggcacactccaaggcattcccgccagacgggcagcttgacgggaaggtatctgccctgagccggcctggacaaccatgcccatgacgtttccttctacatcatctccagagactccagcccgttgcagcgcctccttcatcacaatgcccccaagctcagcagctttcacctctttcaatactccgccgaatttgccaaatggcgttcttgcagcacttacaatgactgttttcctcatggtttcacctcattcagaagatagacagcgcttacaatttctagttgtcttctatgaatgtatgctttgaaacgggcatgaatgaatgaaaaaagaaggctgcgtcaaacagcctccttctaacaactattcatttttcagcaatgccgaagccttttctggaaagtcggtaaacatgccgtctgctcccgcttcaatgagacgcttcatatcttccggacgattgactgtatacggccttaccttaatcaaaccgttcctcattttcttcagtacttcatctgtgacccctgggctgtttaacttcgggtgatagccggaagccggaatagacgcgatatatcgatctgcctgataaagcacatctgaagttaatactgcccgttcgatatgcggtgcaagccgggcgcacagcgccaagctgtcatgattaaacgtggataggatgactctgtcctctacattaaatcgcttcactgcctccagcactttttcttccattccctcatagcggatcacgctgttttttaattcaatgttgatgagaaaatccttttttaccgcccacgagagcacatcttctagcagcggcacttttatatcgctgtacgcttgatcgtgaccagcggccgcatttgcagtctttacctcatcataggctgtatccttcacgaatcctttaagtgatgtcgtgcgattaagtctttcatcatgaattacaacaatgcgtccgtctttcgtcagctgtacatcaagctctatcccatccgctccggcttcaattcctttttcaaatgcaagcattgtattttcgggaaattgacctgatgccccccgatgggcaaaaatctttgtcatcgtttcacctcaaaccctaaagttttctccattatacttattttgtcggctccactctaggattaaggctgtatcaatctactgatcataataagaatcaatgccgttgacaatcgcatctgcggccttttgctggtattcttcacttcccagcttgtccgcgtcagagctgttcgtgataaacccaagctccgccaacacacttggcatttgtgaatatgtaatgacgtaaaagtctgattctttcacgcccctgtctctcgtttgtaaggaagaaacgagctctgactgaatatcggatgcgagacgccggctgttctccccttcataatcagattgaaaatacgtttctgttcctgaagctgaagcaacccctgaattcacatgaatgctgacaaaaaggtcagcctgattggcacttgccttagccactctttcctccaaggtcagaaaatgatcgtcagaccgggatgcaacaggattggctacctcctcttttagtttgtctgtcacatgctctgagacagccaaattaatatccttttcaaagagcccgtttccgaccgctccactatcttcaccgccgtgtccggcatcaatatacactgttttcccttctatcggctctgctgcctgtgcacaaggcgcgagcgtcaaagccaatccgcacagcgccaagctcctccataacattctcaacttactccctccggtcacgagttctttcgcagctgaatatcttccagctgtaaagttccattatccttctttgtatatttcaccaggacatgtgtctgatctggcagtgattcacattcatcacgtttatccttcggaacttgtatcatggtttcttctccattaagagaaaccgcaatcgtatgaggatcagccgagccaatgtattttccctcttcggtaaaccttggcactgagtcatccgcacttgcaacactgcaccccgaaagaaagagcgcagtaaacagcaaaagaaccgtttgtttcacatgaccacctcttcctgatgtttggcttttatctttgaccagaatggcgaatttgtaaagacaacgcgaatgcaggcgagcaagttccatgattttcaaaagggctatacgacccgatcatttcctgttgttagaaagataacgagcagatttgtctatgaggatggctctaattgaggcgtcaattagaaaaaattagcggaaagaagcaactttttattcattttaaaaaatttgagaatagggtgagcaaatcgtttgacgggtgggtcagccaagcgtaaccttttaaaggatatttactttattgaaagaagttaaaaccatgaaaaaattcgttctgctgctggcggcagctgtcatcacatgctccatcggccaccaaatcagcggcggctacaaaggccccgaaaaagagcggcgaaaacatcactctgcactcaagatattcagtcggtaaagcagatcaattgcattaatttttacatataggctagaatatgtgcgaatccaaacgaaagaagatgatcaaatgaatcctaagtataagccactttttgaaccatttacgtttaaaagcggcgttacaatcaacaaccggatcgcagtagcaccgatgactcattacgcttctaatgaagacggtacaatatctgaagcggagctcgactacatcatcccccgttcaaaagagatgggaatggtgattacagcctgcgcaaatgttacaccggacggaaaagcattccccgggcagccggccatccatgacgattccaacattccaggtttaaaaaagttagcacaagccattcaggcacaaggcgctaaagctgttgtacaaattcatcacggcggtattgagtgcccgtctgagctcgttcctcaacaggatgttgtggggccaagtgacgtgtttgataacggcaaacaaattgctcgcgcattaacagaagaagaagtggaaaacattgtgaaggcgtttggagaagcgacaagacgcgccattgaagtcggctttgacggtgtcgaaattcacggtgcaaacggctacttaattcagcagttttattctccgaaaaccaaccagcgcacggatcgctggggaggaagcgatgaaaaacgattagccttcccgctcgctattgtcgatgaagtgaaaaaagccgcttcagaacatgcgaagggtgcgttcttagtcggctaccgcctgtctccggaagaacctgagacaccgggattgacaatgactgaaacttatacgcttgttgatgctttaggggataaagaattggattatcttcatatctcactgatggacgtgaactcaaaagcgcgccgcggtgcagatccgactcgcacacgcatggacttattgaatgaacgtgtcggaaacaaagtgccgctgatcgccgtcggttccatccattccgctgatgacgcgcttgccgtcatcgaaaacggtattccgctggtcgctatgggacgcgaaattctagttgaccctaactggacggtaaaagtaaaagaaggccgtgaaaagcaaatcgaaacagtgatcaaaggcacagataaagaaaaatatcatttgcctgaaccgctatggcaagcaattgtgaacacacaaggctgggtgccttataaagattaatgtgcaaagactgccgaaacgattcggcagtcttttttccctttatataaatagtttgtgtacacatctaaacagcaaaagaaagagctccccaccaacttcgaaaagaaaatccaggaaaaacccctcacgctttcttgcttttttctttttcattcgtacgtctcctttttacatgaatacgccttacttacgattttgcaggagaaaggtttcattttataacggacacatctagggtcgatcatgcttcgtgatcctataagatgtatgaatggaccaagagtgcaggtaataccgccatttgctttccttacttttcaaacctatcctttactatatgcggatacttaatattcttctcccatactaacaaatgtccccaaaacaaaacgcctcctatttatcagcgcaaactaataaataaaagacgtttgatttaatgaccacttaataagctcatgtttaagaagccttatgttctaatctcagcttatccgcaaccattgcaatgaattccgaatttgtcggtttagcttttgtcatgctgacagtataaccgaacaacgaggaaatggaatcaatgtttcctctgctccatgccacttcaattgcatggcggatcgctctttctacacggcttgcggttgtgttgaattttttggcgatgtccggatagaggacttttgtaatgctgccgagcaattcgatgtcattgtataccattgagattgcttcgcgcagatagagatagcctttaatatgggctgggacgccgatttcatggataatgcttgtgatgctcgcgtcgagatttttcttctttggttcaggctggctgctgcgtataatactgctttgcgatgatggcgcacgatgcgtcacactgctggcatttccgctgacctggcggatatggccgacaaggttttccatatcaaacggtttgagaataaagtaggacgcgcctaaatcgacggcctttttcgtgacatcttcctgtccaaaggctgtcagcataatgacattcggctgttttttcagatctgattccctcagcctctctaaaaccgcaagtccgtctaaatgcggcataataatatctaatacgagcacatcgggatctttttctttaaacagcgacaggcattcctgtccgttataagcaacgccgatcacttccatgtcttcctgtccttctatatattcacttaacaggcttaccagctctcgattatcatcagcaacacaaactttaattttctccacgtttcttcctccccaaatgtagttaacaggattcacccttgctacatgtttacattcgacaaaaccgctatataccctctaaaaaaatcataatcaccaatattagtggcatatctttgttattctatgtttttctctgtttttcgactaaaaatgaaatttgacaaacaaggaaacgtgaatttgtcgaaaaatcttcttttgtatattttaccgtatgtattctgagaagtgaagagggatcaaaataaaaaaactgccggaaactccggcagtcagcttgctttttcttttccataaatatcgattcctgcttctgacagcatccattcaatatgaacaccgtagccgcttgtcgggtcatttacaaatacatgggtgacagcaccgatcacttttccattttgaatgatcgggcttccgctcatcccctgtacgatgcctcctgtttctttcaacagtcttggatcggtaattttcaacaccattccttttgtcgcagggaatttttgcggcgttgtgctgacgatttcaatatcgaatttttctactttgtcatcatcaataacggttaaaatttcagccggcccttttttgacttcggtagaaaacgcaaccggcaatgcttgatctgatatgttgttttgaatcggctgatgcagtgtgccgaaaatcccaaacgggctgtttctgttaatatccccgatcgttttgcgttctgaggaaaatcgcgccagtttttctcccggattaccgcctgtccctttttcaattgatgttacagtggatttaacgatttctccattctccactacaattggtttctttgtgtccatatcggaaatcacgtggccaagtgctccgtatttttttgttttcggttcataaaaggtcatagtgccgatgccggcagcagaatctctgatatataacccgattctgtatttgccttctccttcatccttttctgggatcagcttcgttttgattttctgtttatcacgtttgatcagtaagtctaaagattcaccagttttcccagccttttgaataaatggggctacatcattcattttttcaattttctgtccattcatctcaataatgatgtcgcccgcctcaattcctgccgtttctcccggagattttttgccttcacttgtattgatttgatgaaatccgacgacaagaacaccgacggaatgaagttttacaccgattgattgtccgccaggtataacttttaaatcaggaagaacatgcacttttgtttttttaattggaaatccggcaagatcatataccaattctgactcacctgattttttgcccgtcaccttgatttcatgcggatctttctttactgtaaacgcttctgaggattctgatgtctgagcgtttaccgataaactcgtttcaatcgcttgtgtttgggtttcaaatactctcatttgcgttggaatcagtaaatattcttttagcggtttgcataaacctacacttaataacgaaacaaggagaattaaacctactgcttttctgatgttatcgggcattcactacttcactctcctcgctcctatcccacaccttctttatgacttgctgctacatcatttaattttgccttctgacggcttatttataactgtcatatgaagaaaaacattggatatactgatgaacgaatggatgtgcacgaaaaaaataagctgcgcttctcgcgcagcttacccagttgttttgacttgatccgcttgttttaaaagttctttcgcatggcgtttcgttaaatcggttacctcgacacctgcaatcatgcgcccgatttccgctaccttttcctgcttagacagcggcttgacacgtgtcgtcgttctaccgtcttttaactccttcgcaatataaagatgcgtatcggccatggcagccacctgaggcaggtgtgtaatgcacagcacttgtgaacctattgacaccttatggatcttctcagcgattgcctgtgcgaccctgccgcttacaccggtatcaacctcatcaaaaatgatcgatgtcacatcctgttgtgaggagaaaatgctttttatggcaagcatcacccgtgacagctctccacctgaagcgactttcgaaagggattttagcggctcgcctgtattggttgaaattaaaaacttcaccaggtcaatcccttgttcagtcagctgaacgggctggccgtttacaagcggcgcctcttcattgcgtgacgctgttctgaccttaaattccgtatcaaaagttgatttttccatgtacaggctttttaattcccgatgaatctcatcagccagctttttcgcccatgtttttcggatttgtgacacatttgccgcttccactgcgacatctttgccgacggagtcaagctcctttttcaagctttgaaggtggctgtccctgttttcaatttggtcaatctcttcttcaattttagaagcatattccaaaatgtcttcaacagtggcaccgtattttcgtttcagctgtttgatttcattaagtcgcgtctcaatatagttcaggcgttccggatcaaattcaagctcatccagcatatttctcatctgaaatgtggcatcctcaagcaaatagtaggagttcgaaacactttcagacatttttttcagcggttcgtttatatcagatatatcttcaagctgcgctgatgccattccaacccagtccaatccgccctgctcactgcgaagcgcgttatatgcattttgcagcgactcatatatcttctcaaagtttgaaatttgctggcgctcttcttggagctgttcatcttcgttaagctcaagctttgccgattcgatttcttcgagctgaaattgaataagatcaagacgatgggccatttcctgttcgctttcagaaagctgcttaagctttttgagcagcttcacataccgctggtacccttcctgatacgttttgagcgcgctttccacttcggccccggcaaacttgtccaaaagctggagatgattttcgtcttccattaacagctggttatcgtgctgcccgtgaatatctaataaaagcctgccgatctctcttagtgaagcaatcgtgacaagcttgccattgacacggcaaacgcttttcccgctcgtgctgatatcccttctcatgacgatcatttcgtctgaaacgtcgattccctgctcagcgcatacgcctaaaacaggatggccgctctccaacagaaacagcccttcaagttcggcttttgcttccccatatctaacaaattcagatgatccgcggcctccgactaaaagagaaatggcatctatgatgatggatttgccggctccggtttctcctgttaaaaccgtaagcccgcgttcaaaagaaaccgtcagttcctcaataatggcaaagtttttaatcgatagttcagctaacaaacagcattacacctcttatctttgttagattttctgttacagcagttcaaggagcctgttttttacgccttctgtatcttcaggagtccggcaaataattaaaatcgtatcatctccgcaaatggtccccatcatttcatcccagtccaaattgtccatcagcgccccgattgcctgggcattgcccggcatcgttttcagcacaatcatatggcttgctgagtctattttcacaaatgcgtccatcaatgcccgctttagctttgacagcggattgaaacgctggtccgccggaagactgtatttgtaagaaccattatttgtaggcacttttacaaggtgaagttctttaatatcccgtgataccgtggcctgcgttactttgtatccatcctgctttagcatgtcgaccaattcatcctgtgtttcgatttcattgcttgtaatgatctctctgattttaatatgcctctggcctttgttcatgtaagcacctctatttccaagcttatctgttcttttatgttatatgattctctgcacattgtacatgaatgcagaaaaaaggaataatagcgccctattattccggtacatctgcttttttttcttttaacgtcttatgtgcttcttctacaacgcgcatgatctcttcttccggcagttcctggccttcctgtccctctcccggccaatgcaaatgaaggagaaactcaatatttccgtctcctcccgtgattggagaaaatgacaagcctttacagatatagccttcagcggcagaaaaactgatcattcgcttgagcacatcagcatgcactttaggatctctaacaatcccttttttgccgacggattcccgtcccgcttcaaactgaggcttaactaaagccatgcagtcgctgcccggtacgagcaaagtccttaggacaggcaggatgagccgcagtgaaataaaggacacatcaattgtggcaaactccggcatgccctttgtaaagtctgccggtgttgcataacgaaagttcgtccgttccatcacgacgacccgttcatcctgtctaagcttccatgcaagctgattatagcctacatccacagcgtatgactgtttagctccattttgcaaagcgcagtccgtaaaaccgccggtggaggagccaatatcaatcataattttatctttgacagagacgggaaattccttcaacgctttttcgagctttaagccgcccctgctcacatacctcagcgggtttcctttgacagttaacggaaggtcgcggtcaattttttctccaggcttgtccaagcggttttcgtttgaatagacgatccccgccataatggctcttttggctttttcacgcgtttccgccagccctctttccactaataatacatctaatcgttctttctttgacgtcatgatccaattcctttgtgtgtctttggcggcatcagtaatctaatacgatttgccacctgctgttttgtcagtccaatttcctcaagaagcgctgttacacttccgtgttcaataaaccgatcaggtatacccattctgtcaatcggagtatgatattcaccttgatcatgagcgaattctaaaatcgagcttccgaaaccgccttctaagaccgcttcttcaattgttaaaattggcaagccttcttttaggatactcttcatcatcttttcatcaatcggcttaataaaacgcgcattcacaacgcgcacggaaaggccttctttctgcagctcttcggctgcttcaatcgccatttcgattgttgtgccgaatgttaagatgacagcatcgttccccggacgcagcacctcccacgtaccgatcggaatcgttttcaactgttcatccatttttacgccgagtccgtttccgcgcggaaaacgcatcgctatcgggccttcgtcatagctaagtgctgtatgaaccatatgctggccttcattttcgtctttcggcatcattaagaccatgtttggaatgtggcgcataaacgcaatatcaaacacgccttgatgtgtctctccatcagcgccaacgagtcctgcacggtcaattccaataaacacattggcgttttggcggcagatgtcatggacaacttggtcatatgccctttgcaggaaggttgagtaaatcgccaaaaacggcttcataccctgcattgccatagctgccgccatcgttgcggcatgctgttctgcgattcctacgtcgaacatccggtcagggaattcctttgcgaaaccttcaagctttgaaccgacaggcatagccggcgtaatggctacaatgcgtccgtcctcgcgcgccattcgctgcacagttccgctgacaagaccgctccacgaaggagctgcggctttcggctttacaaagtcaccggtattaattttatatggtccggtaccatgccatgtcccaatcgtatcggtctcagccggtttgtaccccttcccttttttcgtgatgacatgcagaagaacagggcctttcgtttttttggcgtattgaagattctcaatcagctcatgataagaatgtccgtccactggacccaaatacgtaaaaccgagctcctcgaaaaacattccggagacgagcatgtatttcaggctgtctttgactcgttccgccgtggcggcaagcttgcccccaactgccggaatctttttaaataagtattcaagctcatctttgacccactggtatttccccgcagtacggagccgtccgagcatagagtgaatggcaccgacatttggtgcaatactcatttcattatcattaaggatgacaatcatgtcttttttctcgtcgccgatgtggttaagggcttcgagcgccattccgccggtcagcgcgccgtcaccaattatcggaataatatattcatccgttcctttaatatcacgggcagctgccattcccatcgcgcctgacagagaagtcgagctgtgcccggtttcccaaacatcgtgctcgctttcactccgctttggaaatccgcaaagccctttgtactggcgaagcgtcgcgaattcttttcctcgtcctgtcagcagcttatggacatacgattgatggcctacatcccataaaaatttgtctttcgggctgttaaattccttatgcagagcaatagtaagctctacgacacctaagtttgggccgatgtggccgccggaagcggataaacttgtaattaaaaactgacggatttcatcacttaatttctctaattcatcaatggacatgttttttaaaaacgacgggtcctgtattgataaaagatccaaagcggatcaactcactttcagcatgaatttctgcaatgatacatgtcttttgcatgccgagctgacaataatctcagacataaaaaaagacaaacgcgcttttccttttcatttttcatataaactgcttacattttaccatacctcgtgcagccgcttcaaattaggatcgttttagtgatctcttgccgcaattaaatcacaaagctcatataaaaggtctttttgaagagagagtccgccgatcaatcgcttcgcctcttttatatgaacatccaatttatgtttggccccttccaatgaaagaagcgacgggtatgtcgatttgtcatttgtggtatccgagccgacacgtttgccgattttctcttcactgccttctaaatctaaaatatcgtctctgatttgaaatccgattccaatgtggctgctgaaggtacgcagtgtttcaatgtcttcctcaggcgcatcagccaaaatagcaccggcgattacacaaaagccaaggagcttggcagttttccgttcatgaatggattcgagctcttcaagcgtgacttgtcggttttccgcttccatatcagctacttgcccaccgaccatgccttcggtgcctgccgctgaaatcagttcattcacaagccgcaggcgcttttctgctgacacctcgtctgacacgtgggaggtaatcagcttaaagctttctgtgagcagcccgtcacccgctaatactgccgtcgcttcaccaaacactttatggtttgtcggcttcccgcggcgcaaatcgtcatcatccatgcatggaagatcatcatgaattaacgaatacgtgtgaatcatttcgacagcacagcccaccggaatgccgtctttttcgctttttccatatgcatttaaaacagccagtacaatcagaggccgcagccgctttccgccggcctgtagagaatacagcatagatttctttaatgagtccggcatatcaagcttttctgtatagacagaaagctgattttcaattgtttttttccggtccgccagaaagctcgttaatttatttgtcaccttcgtcttcctcctgaacactgaaaggtgccagttcgccgtcttcttttaaaatgaagtccatttgcttttcgactttttgcagcttttcatggcacatttttgacagagccatgccttcttggaaatagttaatggcttgctctagaggcacatctccctcttcaagctttgatacaatgctctcaagccctttcatcgcttcttcaaatgtcatgttttcattttttttcacgtctgtcatttttcttcccctctcttttctaatacttcacaggtcagcacgccatccttcagcttgacttcaagccggtcctgctcttctatttgactgacacttttaatgagtttatcttctttataagccaagctgtatcctctttccatcacttgaagaggacttagtgcattcagcttgccaagaacggtttgaaattgggaatgcagctgcttcatttggatattcatattttttctcagctgatttgtttgttcctggtatcgtgttctcgcttgtttcagctgttcatgaggatgcagtgcctctaatctgtacgtttcacgctccagctgtctgcttttccgatctaaaagagcggtcagctgtgcttgaaactgctggtacgcgaggtcaaactgctgctctttttgcgcatacaaacgctttggaaaacgaaaggcataggacgattgcagcgtttgaatccgttcttttttctggccgaggtgctgctgcatcgctcttgtcattctgacttccgctgtttttgtccgttcgattaaatcagtggtatgaggcacagcaatctcagctgctcctgtcggcgtcgcagctctgatatcggcgacaaaatcactaatcgtaaaatccgtctcatgtccgactgccgatataatcggaatattggaagcaaagatggcgcgtgctacaatttcttcattgaatgcccacagttcttctatcgaaccgccgcctctcccgacaattaatacgtcgcaaatctctttttcatttgcctcttcaatgcgcgtaacgatggatctgctcgcattttcaccttgtacgagcgctggaagaacaatgacttttacaaggggatatcttctttttagagttgtaataacgtctctgacagcggcacccgttggagatgtcacaaccccgattgtggctggaaatgcggggatttgttttttgtagcggtcgtcaaataaaccttctccggcaagcttcttttttaattcttcgtacgctaaataaagcgctccaatcccgtcaggctgcatttctttggcatataattgatagtttccgctcggttcatatacggaaattccgcctctgaccagcactttcattccgttttcaggtttaaaaggcagacgctcgctttgtctcgcgaacatcaccgactgcattcttgcgttttcgtcttttaaagtgaaataaatatgccctcgtgtgtgtatctttacattcgacaattcgcctttaatccaaatattttcaaggtgaggatctacatcgaattttcgttttatatactttgtcagcgctgagacggtcacatacgctgcttcacccatgtctaaaaactcctctcctaagcattcctgcaccataactaaagaaaacccgccctggctttaggagcctgaagaagcgggtatcgtgctcatattcaaggcgggcaaacatttcgcctgtgaatatctccaattatctatgataacgtacgtttcgcagatttaacagtattatgcgcaagcatcgtgatggtcatcggacctactccgcccggaaccggcgtgatgaaggacgctttttcctttgccccttcaaattcaacgtctccgcaaagctttccgttttccagacggttaacgccgacgtcaatgacaacagcgccctctttgatctggtctgcactgatgaagttggctctgccgactgccaccaccaggatgtccgcttttttcgtatgttcagtaatattttctgttcttgaatgacagtaagtaaccgtcgcgttttcatttaataaaagctggccgacaggtttgccgacaatgttgcttcggccgactacaacaacctctttaccggaaaggtcaatattggttttcttcaaaagctcaacaattccatgaggcgtgcaaggaagaaacgtatcttcgccaagcagcattttccctacgtttaacggatgaaaaccgtctacatctttatcaggggagatacgttcgatcaccgctttttcagaaatatggtctgggagcggaagctgaacgagaatgccatgaaactcagggtcttggttatattgatcaataatggaaagcagttcagcttctgtgaggctgctgtcaaattgatcgagcttgaaattcattcccattgtttctgccgcttttttctttcctcgcacgtaagagtgagaagcaggatcatctccaatcaaaataaccgccagtccgggagtgacgccttgctttttaagctcttctacctcttttgccaattgttcgcgtttttctctagccgtttcttttccgtcgatgattgttgcagtcattttctttcctcctatgattgttcaatatcagatttaatgttagaaagaaccccgtttacaaactttgtcgctttgtcatcaccaaaccgttttgccagctcaatcgcttcgttcatggagacattcaccggaatgtcttcggcatatgccatttcatatgctgccaggcgcaaaatcgcacggtcaacattggcaatccgatcgagcttccaattcaccagatgcttggagatcatttcatccagctggtcttggtgttccaataccccgtgtacaagctgttcaaagaaaggatctgttttttcttcatccagtgcgtgttctatggcttcattcactgcaatatcgctgacatcaatttgaaatagtgcctgcaaagctttttctcttgctgttcttcttttcattttctttctcctttgatcctctttatccgcttgtcgttaagccacaaagagatcataacatatttttttcgtatccgcatattgaaatcaaggtttttttaccctattaccgaatattttcacacaccttaatatgattattcggatttcacgttcatgaagaaactcggctatgtaagccggctttcttcatgctttgaaataaagggtaacgtgtaaaaaaaccaaagggccgccctccccttggtttcgtgttaagccatttacatttcttcgtcgatttggacttcttgggcttttgtgtcaaattgaatgccgacgatgtgaatattgatctcgttaatcgaaagagacgtcatatttaataaggtttgacgaatgttttcctgaacggatgctgcaactttcggaatcgaaacgccaaatgtaacgacacagtatacatcgatcgtaattccgtcatccgccaggtcgactttgacacctttgccatgattcactttgccaaagcgctcaacgacgcctgtcgcaaagtttccgcgcatttcggcaactccatcaacttctgatgctgcaatgccggcaatgacctcaatgacctccggtgcaatctcaaccttacccaaatgcgtatcttcgtgatccattttaagcaagctgttgtctttcattcaattcacctccgtaaaaattatgagcccattacatcatatgtttctaaaaatttcgtattaaactctccgctcacaaatgtttcgtgttcaagcagttttaaatggaaagggattgttgtctcaatgccttcgatgacgaattcgctcaatgcgcgcttcatgcgggcaatcgcttcatccctcgtttttccgtatgtgattacctttgcaatcatgctgtcatagtacggtgggatggaatagccagggtacgcagctgaatcgacacggacaccaagaccgccaggaggcaggtacattttaatttcaccaggtgacggcatgaaatttttacttgggttttctgcgttgattcggcattcgatggcccagccttcaaattcaacatcttcttgcttgaggctcagttccattcctgatgccactttgatttgttccttgatcaggtcagttcccgtcaccatttctgtgactgggtgctccacctgaattctcgtgttcatttccatgaagtaatagcgctgttcattgtagtcatagataaattcaactgttccagcacctgtatagccaaccgcttttgcagcctttaccgctgcatctcccatttgctccctgatttctgaatcaagggcaggagatggtgattcttccaaaagcttttgcaggcgtctttggatcgagcagtcgcgttcgcccaaatggatcgtatttccgtagttatcagcaagcacttggatctcaacgtggcgaaaatcttctatgtatttttcgatgtatacacctggattcccaaatgcagttgccgcttcctgctgtgtaatcttaatgccattaatcagttcctcttcagtgcgggcaaccctaattccttttccgcctccgcctgcggtggcttttataattacaggatacccaatttcattagcaagcgaaaccgcttcttccacattttctataattccctgtgaacccggtacgattggcacgccggcctgtttcatcgtttcccgcgcaacgtcttttgttcccatttttgaaatggcgtcagcgctcgggccgacaaacgtgacattcacttcttcacataattcagcgaaatcagcattttcagctaaaaatccgtatcccggatgaatggcgtccgtgccagtcagctttgcaacactcacaatatttgtaacgtttaaatagctgtcttttgatgctttcggtccgatacaaaaagcttcatcggccatttgaacatgaagggcatctttatcagcttctgaataaacagcgacagtctcaattccgagctctctgcaggctctgatgattctgacagcaatttctcctctgttggcgatcaatagctttttaatcatgttcagtctccttactccgcttttacaagaaatagaggttgtccgtattcgaccagctggccgttttctactaatacttcaacgatttcgcctttcacttctgcttcgatttcgttgaaaagcttcatcgcttctacaatgcagacaactgtgttttcatttacttttgaaccggctgttacatacgggccagcttccggtgatgaagaagcataaaatgttcctaccattggtgaagtgattttatgcagattctcatcttgctttggtgcttcttgggcaggtgccgctgcttgctgcgcttgcggctgaactgcctgcggagcctgtgcttgtacaggtgctgccggtgcctgctgcatgacttgaaccgtgcctgcttcgtgttttttcagttttaaggatacaccttcattttcatatacgaattcgtcaattgtagactcgtcaattgctttaatcagctcgtggatttctttgatatttaacattcaatcgcactcctatgtatgaaatttctttttttataggttactgctaaaagtacatactatgttcatcttacaggagcggacttttgaattcaactctaatatgacagcaacgcaaaaagcccgcttgtttagcgggcttttttccctcattcttatttagagggttcaaatgtgacagcgacatctttcattgttttgatttcttttgccacaaggtctataatggctgtcgccttcgatttagagtgtttgtctgatttgactgtaatattgattttatctccttcagcattaacaagcgcatcctcgtaaccttgtgttttaatcagcgtttccagctgtttttctgttccttccacttcactgagagccgtcattttatcgtatgcttcgcttttctccttggctgttgcatcatcgcttgacacaatggcattcagctcttctctttctttgcttctggcatcttctaaatcaagacggtacgttgtaaacaaatcatcatcggctgtttccgtaacaacagttcctttttcactggcttcagcggatgtttccttgtctgctgatgaatctttcgttccctttgttccatcttcttttcctttttcagtttctgtaccgcttttttccttcgtgtcttgcttggcaggcgctttttcagttgcgacctctccgctgtcagacgcgcttttttcactttgcatctgcacggcgtttttgctttccggcgacatgatatagtagacgcttaacaccacgacaagactgagcattgttaatagccaaacggtttgttttttaagcatttatgaatcctcctttatttttttaggggcaaccgcaacccggtggcttggaacatccaggacccgtgtcaccgcttcgataatggtttgttttatttgaacgttgtccactccttgagcaacaacgagtacaccgcgtatatcaggttttttcgtttggacgacgacaggtgtttctttatcgccgtttttgatcatgacgatttcttcctccgatgtttggtctgtaacgcttcttgttccgccttctttgtcagtttcttcggtggttgtatttttgtttgatttgtttttttcgtatactttcagcgacgttgcatctacattcacgacaaccgagacatcgtccacaccaatgattgtttcaagaatttctttcagctgattttcgtattctttttcatagtcatcgatcgagtctttaggtttatcagattttgaggctttaaacacttcagctgttttctctttgctgcccgcggaatgttgcgatgatacggccgttatcgttttggcgttttctgttttctcaggtgaagaaaacagctggctgacaagcataaaggaaactccgagaacaaaaacgaatagaaagtaatgatatttggtcagcttcggcttttcgccgtccttcgtttgtcccggaagaaactgctttttcaatacattccataatccgtttttattcattgccgacactctccccgccttccatatgaaccgtaattttctcacttccgatttcccaaatgtccgcgagctgcgtttgtatctgtttggcttctttttgttcggctgcttctttcgttacgtatgcatgatctgtatcaatgtggaccggcgcgaccgtttggaccgttttttcagaagacggggccatatacacgctgattgttttaatatcctcttctgaatctaccttttctcctgccgtgagtttgatgcggcctactttatattcatcatgactgaatctctcctccgctttcttttttagttggacagccatttcttctagaatatatgcgcgctgggaagcttgtatttctattttttttgaattgatttgattttttatgtcggcagactctgactgcccgttttttgtgagatattcaaagatgatttcggggtctgtcttgaaaagtttaaaaatcggcgtaagcatgacgacaatcaagagcaggctgactaccatttttgcgtacttttgcatgctggagctcggcagcagcatatcaatcacaattgcaaataggataaacaacacgatggtggtaagccattccgttaaaaaactcattcgcctgcctccttcatttcatcatcatcgtgaggtttccggctgtgattatgacagtaaggcttaaaaaaaacatgagagacacaatagcgagagctgcaaaaatataaatgacgcttttgctgatgacgtcgaggcaggtgatgacgggcccgcctcctagcggctgaagaatcgcggctgccagcttataaataaaagcgagggaaagcactttgattgccggaaatgccgcgatacagatcaaaatagcaacaccgagaatccctaccgtatttttcagcagtaaagaggcgctgattactgtatctgttgcgtctgtaaacattcggccaagcacaggaataaaatttccggttataaatttagccgtcctgagcgtaatgccgtctgtcactgcagctgaggctccctgaacagagatgacgccgagaaagatggtaagaaaaacagccagcgctccgatagcgatatttctgagcaggttagccagctgcgttactttgtattgttcggtcatggtgctgacaatgctcagaatcgctgataagaaaatcagcggcatgacgatattctgaatcaagagaccgctcgtgttcatcaggaagaggataacaggatgaaagaaggcagcagatacagctccgcctgaggaagccaaaagcgccaagaggagcggaatgagcgccaggataaagctggtcatcgtctgaatcgcctcagttgcatagttaattgccacatgaaagctattaagcgcaaggataatcagcaccatgtacacaattgagtaagcgaccttactgacggtgctttgctgaaaagcattttgcagaagctgcagaatgacgcaaaaaatcgtgagcaaaatcaatgtgcccagcagctttccgttggcaagcacttcatgaaacaaataagaaaagagagctttcagccattcttgcggtgagaatgatttatcgccattgataaactccattaagctgcctttttggctttccggcagcagtccgccgtattctgtcataatgtcattccaaaattccccgatcttatctgtttcaagcgaggctgctgtcctttccgctaattgctcagctgtttcagcatggtcttccgtttgttctgcattaccagctgcttgtacaatttctgcacggcctgctatgatcagcacggccaaaagcaaaacccattgaaagcgcttcaatctaccgcctcctttcggttatgacatagaaggtataagtccgagaatcgtttcgataatgacggttaaaataggcacagccataacgagaattaaaatttttcccgccaattctattttcgaggcgatggccccttggccggcatcttttgtgagctgcgccccgaattcagcaatataggcgattccgataatctttaaaatggtttcaacatagaccatgttgacatttgcattaatcgcaattttttctatcattcgaataatgtcgtagatttggtctactaaataaagaaaaatggcacatccggcaaaaacgacgattaaaaacgcaaaagtcggcttttgttcttttacaattaaagaaaggaaggtggcgatcagccctaaacctacaatttgaacaatgtcaatctgcaagcccccctatccttggaataaaaacacagcttttatctttttaaataggtcatctacaatcgtggcgaccataaataaaatatagataaaacctaacagcgtcacccactgagcgtattctttcttgcccatctgatccaatatcgtgtgtaaaaaagcgaccacgattcctactccggcaatttgaaatatgacattcacgtctactcccattttatttttgctcccctcacgtttacatcaatagaagaatgagtaacaagcccgctaaaaagcccaaactttttatcattttttcatttttcgcttgcgcctgctcagcatccgcttcagaggcttccaaatgtgtcagcgccagcttgatgtgcttttgctgagagattcgatcatgaatcccgagcgtctcgccaaactgcttcagcacttcgtattcgctttttttcaaagacagggtgtcccataccttctttaagctttgctcccacgccgttttcgcggaatcacttcccttgtccagctgatcactgaatgcggaaaaaagagctgaaacaggctgtgcgagctgtttggcaatctgctgtgaagcagtatgaagcggtgtatggccgtacatgatttcagcctcgagggattgaagcgccgcacgcagctggcggatttgccgcggccgttctgtataaatcttcgccatctcaaaacctgtccatgttgtcgctaccacaataaatacagcgcccagcagcttcagcatgttttcacgcccgtcgtcctagacagcacatttccgtctttgtcataaatttggctcactgtgcccggcccttttgctcttgataattccaaatagcggtcaaaggctctttcttcccacaaacgcttcaatgaaggccgcttcatcaggtcggatatgctccagccatgcgccgatacaattactgaaacaccagcatgcagtgcctccagaagtgcatctgtatcttccatacgcccgatttcatcgacaatcatcacctcagggctcatggatcgaatcatcatcatcagcccttcagcttttggacaggcgtctaacacgtcaattctctgaccaaattgatgttgcggaatgccgcgaagacatccggcaatttctgaccgttcatcgacgattcctgtctttacgggcagcatgggttttttgccggtgcttgagagcctcgcaaggtcccggagaagtgttgttttgccggtttggggcggtccgataatcagcgtattcagccagctgtcttgatataagtatggaagcagcggctccgcaatccccagcttttcccgggcaattcgtatattaaaagatgcgatgtcacggaggcctttcacacctccgttttccgtaatgactctgcccgccagtccgactctgtggccgcctctgatcgtgacataccctttcttcagctcttcttcaagagtatacatactatagttgctaagccggctcaggatcagatgggcatcctctgccgtgcccgcataggacaaataaacaggttgtcctcttcgaatcaattcaacagggcggttgatccgaattctgacttcttcgatttccagccattgttgttccggtatttcagaaagggcgtttttcatggattcggggagaacctcagcgatttcattcaacagagcctcctcctttctaccgattggcttctttaaaatgtatgatgtgaggcagactttatgacaagcctctctttatttatgaacacccgccaaaatcaaaacaacacccgtaaaaatcagaatcagctttgcatacgaaagctgcccggcaatttggtagattccgacagtcatcgtaatgataaaaatcaacggaccgacaatagcgagaatgctgttaaccacaaccgccttccggacatcgttggtcacaagcatgacaattgctgccgtcagctcaatcatagaggataaaactcgtaatcccgccattgttaaaacagtagaattgatatttccaagtaaaaatttcatagcactctcccaacctcccatttttttatatgatatgctctagcttggtgaagtagtcttgtcattttcgtataaaagaaagattctgtttttgggcacaaaaaaagcctgctcccatttgggaacagacttctttttttctttctatgctcttgaaacgtaagaaccgtctgatgtattgacaacaagtgtgtcgccttcattcacaaagaacggcacgtttacaacaagcccggtttcagttttcgcaggttttgtaccgcctgacgctgtatcacctttaataccaggttcagtttcaacaactttcagctcaactgtgtttggaagttcgataccaagtgtttcatcctggtacatcatgatatgcacagacatgttttctagcaggtattttaattcttcttcgatttgagttgcgctcagttcaagctgctcataagaagaagtatccataaatacgtgctgatctccgtttgcatatagatattgcattgttttggtttcgatttgcgctttcgctactttttcaccagcgcggaatgttttttcctgaatggcgccagtgcgaaggttgcggagtttagagcggacaaatgccgcaccttttccaggttttacgtgctggaagtcaacgacgcgccaaatgccgccatctacttcaattgttaatcctgtacggaaatcgttaactgaaatcatgtttaatgtcctcctatattccaatcacaaaataataagttcttttggggaatgggtgattgtccggttgccgttttctgtaatcacgatgtcatcttcaatgcggacaccgcctgtttctggtatgtaaatgcccggctccactgtgaccaccatacccggttcaaggatagctgaagatctgacggataatcccggagattcatgaacttccatgccgagcccgtgcccggttgaatggccgaaatagtcaccgtagccttttacagcaatatgatcccttgtgagggcgtcagcctcttttcctgtcattcccggcttaatatgtgcgacgccaagcgcctgagcatcaaatacaacctgatagatctccttcaattgatcactgggctgacctacagcgaccgtccgggtaatatcagaacaatatcctttataataagcgccaaaatcaagcgtaacaaggtctccgctttcaatcagtttgtcactggccacaccgtgcggaaggcttgaacgaaggcctgaggcgacaatcatatcaaaagaagagctgtctgctccctggcttctcatataaaactccagctcattggcaacagcgatttcagaaataccgggtttcataaacgtcaagatatgtctgaaggcatcatctgcaatcttcgcagcttcctctaatatcttaatctcttcactagacttaatcaagcgcaacttttccacggattcagccacaggcactaattcggcatcactgataacggcgctgtatgaagcgtaagtgccatatgtcatgctgttctgttcaaagccgagacgcttgatgccaaacgattcaacagtgtcggcagtggtctgaatcaagctgccaccatgttcaatgatctcaaaaccctttacctgaaccttcgcctgctcagtataacgaaaatccgtaataaacgctgctttgtcacccgatataacagccaaacccgccgaacctgtaaaccctgtcatatagcgtacattcgtgctgcttgtaatcagcatgccgtcaattcccagctgtccaaacaggtttcttaatttctctagcttcatcttgattctcccccttgctggcttaataagtagcgaacagcaagcttgtagccttcagctccaagaccgacaatctgccctttcgcaacaggagcgataaccgactgatgcctgaattcttccctggcgtataagtttgataaatgcacctctaccacaggaagactgatgcttgaaacagcatccctgatcgcatagctgtaatgactcagggcgccggggttcagaacaatcccgctgtattgctcctcagcctcatgtatcgcatctatcaaatcaccttcgtgattagactggaagaaagtgagctggatatgtaaggcttcagcaaactgaaaaagatctgtttcaatatcggtcagtgtctggcggccgaatacttcaggctcacgactcccaagccggttaacattcggtccgttcaaaatcaaaaaatgaggcacataatctctcctttttgcgagggtttctcatgtaaaaaatgttcacttctcgtgaacattttatcatactggaaaaggattatacactattctctatgcattcccagcgcacgtgcaagcttttccgaattcagctcattgtattcaaatgaaatggaatacccgacaaacagcccgtaaagcaaataaatgcaaatggtcgtaataattgtatctgatgtcagttcggtcaccgtgcgcacatctggaaaaatcggattaaaaacaaaaaacacgagcagccaaagcaccaagccgtataaaatacccggccacattgtttttaaacgtttcaatagaagaaaataaagaaatgctgcgccaattgaaattactccaatcaaaatgatgctgattaccgttcccagcccatgttttttccactctccgagcacaaacggctgcaatatcatattcgggctgatttcggaaaaatgaaacaaatatgcgatataagcaacgaaactccaaagtacgcctccgcaaaaacctgttgccgccaccctgccggccattgaaacaggcggcttttgcttctcattcaattcttcattttgttctgtatctttttcgcttgtcatcatggcacctccagttaaagtgtgcccaaaaaaagaaatgtcaataaaaaagctcacactttttgacagctgcgagtaaaatttgaaaataacgggtataatgcatgtagaaaaagcaaggctatggcaattttttcagcttgtcaatctagaggtttagcgctgtttcctgtacaatagagtgaaaggaaatggttagcaatcctaaagaaataggcaggttgataatatgtcaaaacataaagttccgcccgcttacggcgggcaggctgttgtggaaggcgttatgtttggcggaaagcatcattacgttacagccatcagaagaacggatggaagcattgacttttttaagcttccacgcaaacacaacccgaaactgaacatcgtgaaaaagatcccgtttttacgggggatcgcggccattatcgaagcgagtgcaaacggcacaaagcatttgaatttttcaagcgaacgttacgggctcgatccatctgaagacgagacacttgagcaggaagaaaaaaaatcctccgggctgtctatgtatctcagcctcgcagttataggcgtcctatcatttttgttcagtaaattcgtatttacattggttccagttttcttagctgaactgacaaggccgattttttcctcggacacggcgcaaatcgcggttgaaagcctgtttaagttgattttgctgctcggttacatctattttttgtccatgacaccgcttattaaaagagtgtttcaatatcatggagccgaacataaagtcataaactgttatgaacagaatttgccaattactgtggagaacgtccaaaaccaatctcggcttcattaccgctgcggatcaagctttattttatttacgattattgtcggcatgtttgtttatttactcgttccgacagatccgctttggctgcgtgttatagatcgtgtcgcactgataccggtcgtgcttggtatatcctttgaagttctgcagctgaccaacaaagtgcgtgacattcccggtctgaaattacttgggtacccgggactgtggcttcagctgttaaccacaaaggaacctaaggatgaacaggttgaagttgccatcgaaagctttaacgaacttctcagactcgaagcattgtctgagcaaaatcagaagccttctcacaacgtcatctaaaatccgttgccctgctattactttcggaggtggacagttatgaatcatcgtgtacaacctattattgctgtattaattgcgctgggagcgttcggtttcctctatgtgctggtaaccaatcccggagaaatggcaaaaatggcggtaaccgtcatcgtggcaggtatcattatttattttattgtgaaatatgtaatgaatcgaaatgcgggcagcgaaggagcagccttcaaaaaagcggcgaaacaatcgcggcgccggatgaaagaacataaagcaaaacaccgcgccggacataagggacgtgtcagccacctgcgaagcgttccgagcgccagcaagcctaagccgatgattctcaagaaaaaaagccagactcagctgactgttatagaagggaaaaaaaataaaaagaaaaacagagcgcttttttaataggtccactgctttaaaaacagctctgtccgtcttttacctagctcaatcagggctagttttttttgttgtgttaaatgaaaatcagttgccattacgccatcaaccgggagaaaaatgatattttgttcatagcgtgatgcaatgtgccttgcgtcatgggcatccttcatcgtttcaaacagggcgccgaacagttcaaaagcgttgcggatattttttttcggacgctctctttcacgcggcgcaagcgtcacaccgatcacagggcgctttctttcctttgaaaacagccagatggggaaattgcttaacacacctccgtcgacaaccgtggcggtgcctgtgtccgtttttaattttatcggttcaaaaaaatacggaatgctgcagctcattctgaccgctctggcaaccgggaacatatcgggatttaacccgtaacgggccaaatcgtccggcaaaacaatcatggtgccgtttgtcagatcagaagcaataaggcgcagagaccctttctgcaaatcgccgaaaacccttatgcctttcgctcttaacagatcagcaatccattcttctatcgtatcgcctttgtataagccaagacgccagtagatggacacccactggagcatttttaaggggagaaaagagtacctttgatccagcaatttctctccgtccacttcttcaattaaagcgtggatttccttactggtgtaacctgacgcaatgaaagcggcaataatggcgcccgcgcttgtacccgcaacccttttaaagcggaagcctttttcctcaagcgcttcataagcgcctgcaagcgcaatgccttttactcctccgccggaaaacacaccgtcaatatacatctcattccctccccctccatccgatcgtttattaccattttaagaaaacacgcgcagaaatagaccaactaatgacgggtggcgtcagcgtatcaaaaaagacggcctccttcgagaccgcctttttactgattatgatgttctgttttcttttggattgatttcagatcttttttacgggcatcatcttcttcaaaatattgaacaagatccccgatgcgatcaatactgttccagcttaaatgatgttcgattccttcgacatcgttatatattttctcttcatcaacaccaatgattcttaaaaactgctcaagcaattcatgtctgtataccagccgtttgcctatttttttccctttagacgttaacacgagaccgcgatatttttcataaattaaatattcgtctttatctagtttttgaaccatttttgttacagaggagggatggactgccaatgcttccgcgatatcggaaactcgtgcatatcctttttcttcaatcagcatataaatctgttcaatataatcttccatacttggtgttgtcatcgaaaccctcccaaaaagcaccttaactttataaaccattacaagtttacactaatgaacttgaaaaaacaaggatgctccgcgggtcaaaagccctgtttaccgcttataattccattcatctgaagcgtactttgtttcagccaagtgatgaacaaaatcaagctcttcctgagaaagttcatatggctccaaatgaatgttaagacctgtttcaaatccttctttaaaggctttacgagcctcatccatcgtcacccgcttttcggtgagttcattaatggcaaccgctttgtttttgaaattgcgctgcatccgctctcttactctttcacttggatataagaacagatcgaacagcttgtcctcatctaaatcaagaagaatggagccatgctgaagaatcacacctttttgtctcgtttgcgcgcttcccgccaccttgcgcccctcaaccactagttcataccacgaaggcgcgtcaaaacaaacagatgaccgcggattttttaagctttctttttctttttcagttctcgggatggcaaagtaagcgtccagaccgagatttctaaagccttgaagtatgccttctgaaataacccggtaagcctcagtaacagtcgccggcatctcggggtgctcttccgaaacaattacgctgtatgtcagttcctgatcgtgcagcacacctctcccgccggtcgggcgtctgacgaatccgagattatatttatgtactgcttcaaaattgatttcctttttaatattttgaaaataccctacagaaagtgtcgccggattccagccgtaaaaacggataaccggggggattttcttttcgctgtgccaatataaaagcgcttcatcaagcgccatattgaatgcaggacttgcattgcctgagtctataaaccgccaagtttctttttgcattttaagaccttccttaccgttttaatagaatcagtttatcaaactgtcgggaaaatgaaaaatattttagttccattatagatgacaatcacgctgtgctttactataatagtatttgtcgaaaacggctctatgaccttgttttatgaagcagggttttgattttatatgctaaaggagtagaatcacattgtctaatatgatcgttttgattatttttgctgcgtttatcatctatatgattgcttcatatgtctatcagcagcgaattatgaaaacacttaccgaagaagaattccgcgcgggttaccgcaaagcgcagcttattgacgttcgtgagccaaatgagtttgagggcggacatattttaggcgcccgcaacatcccgctttcccagctgaaacagagaaaaaatgagatccgtacggacaagcctgtttacctgtactgccaaaacagtgtccgcagcggacgcgcggcacaaaccctgcgcaaaaacggctgcactgagatttacaacctaaaaggcggctttaaaaaatggggcggaaagattaaagcgaagaaataaagcaaacagctgtctggtagacagctgtttttatttatctttctaccgcctcgtatctgagcaccgggtgtctcgccgcttttgtttcatccattctttttacaatcgttgtatgcggggcctcctgaacaagttccggattctcctccgcttcttttgcgatttgaatcatagcatcaataaacgcgtccagtgtttcctttgattcggtctctgtcggctcgatcatgatgcattcttcaacattaagcgggaaataaatcgtcggcggatgatagccgaaatcaagcagccgttttgcaatatcaagcgtacgcactcccagctttttctgccgcttccctgataatacaaattcatgcttgcaatggcggtcaaacggaagatcgtaataaggcgcgagttttctcatcatataattggcgtttaacactgcgttctcagtaacagcctttaatccgtcaggccccatggagcgaatatacgtatacgctctcacattaatgccaaagttgccgtaatacggcttcacacggccgatcgcatgagggcggtcataatcaaacgtaaagcgcccttcttttttgactaaaactggctttggcaaataaggaatcagatcttgttttacgccgacagggcctgagccggggcctccgccgccatgagggcctgtgaatgttttatgcaggttgaggtgcaccacgtcaaatcccatatcaccaggtctcgccttgcttaaaacggcatttaaattagcgccgtcataatacagtttcccccccgcttggtgtacaatttccgccatctctgtaatctgctcctcaaacaagccgagcgtgttcggattcgtcagcataagagctgcagtttcttcattcactgctctttttaaatcctctaaatcaacaagccctttttcattcgatttcaccgtaacggtttcaaagcctgctactgttgctgatgcaggattcgtcccatgcgcggaatcagggacaatgaccttcgtccgcttgaaatccccgcgagcttcatgataggcacggatcatcatcagccccgtccattcgccgtgcgctccggcagcaggctgaagcgtaacctcatccattcccgttatttcttcaaggtgtttgcttaaatcatataaaagctctaatgcgccttgcaccgtgtcttcatcctgaagaggatgaatcgcagcaaaaccaggaatacgtgcgattttttcattgattttcggattatatttcatcgtgcaagaaccaagaggataaaaaccggaatccaccccgtgattgcgtttggacagcgctgtataatggcgcatgatgtccagctctgaaacctccggcagcgctgcgtcttcgtcacgaatataggtgtctgacaagaggtcccccaattcgatttccggtacatcgagctccggcagactatagccgattcggccttctcttgaaagttcaaaaataagtgcctggtcctgattactcatggcgatcccccaattcctgaatgagtgcgtcaatttcttcttttgttctcagctccgttacagcaatcagcatatggcagtccagctccggatacgtcaacccaagatcatatccgccaatcatgccttttgccagcaaacgcttgttcacagctctcaccggctcatccagtttgatgacaaattcattaaacatcggcccgtcaaacataacagtaaggcctgctttttttgcttcttgctttgcatagttggcttttaagagattttggcgggctatatcttttacgccgttttttccgagagcagtcatggccactgatgctgcaagcgcatttaaagcttggttcgagcatatatttgatgttgctttatcccggcggatatgctgctccctggcttgcagggtaagcacaaagcctctttttccgttttcgtcttccgtttgtccgacgagacggcccggcacctttctcattaattttttagtaacggcaaaaaagccgcaatgcgggccgccgtatgctgaaggaatgccgaaaggctgcgcatcaccgacgacgatatcagactgaaacttgcccggcggagtgagaagacctagcgccagcgggttagctgaaacaataaacatggatttcccttgatgagcgataggctcaatatcctttagcggctcgatcctgccgaaaaaattcgggtactgaacgatcactgcggctgtgttctcgcaaacggtttggcgcaatgcatcaagatccgtaacgccatccgcagcgggtacttcaacaacatcaatatactgaccttttgcgtacgttttcagcacctctcgcgattcaggatgcacggtttttgacacaacaatttttttctttttcgtgtggcctgaagcaagcattgctgcttctgccaaggctgttccgccgtcatacatcgaggagttggcgatatccatgcctgtcagttcacagatcatcgtttggaattcaaaaatagcctggagctctccttgtgaaatctctggctgataaggcgtatatgcggtataaaactcagagcgcgaaatgacatgatccacaatgacaggctgatagtggtcatatacacccgctcctaagaaagaagcgtattgtacggtatcacgatttttagaggccagctttgtcagttctcttgttaattctgtttctgatttcgcttttttgatttgatactcttttttatatttgacgttttccggtatatcagcaaataaatcatcgatgctgcttacgccgatagtagcaagcatctcctgtttatccttttctgttgcgggcaaataacggtgcttcatgtgttgtctcctctctccaagaaaaaatattagcgtttataaaatggtgttttgacaacctttgctttcactaattttttgcgaatctctacatctacaacagtcccgatctcacttgtttccgaatcaattaaggcaaggccgacgtttttccctaatgtcggtgactgcgtgccggttgtcacctttccgacagacttgccattttggaaaacctcatatccgtgccgcggtatccctttttcaatcatttcgagaccgacaagtttgcgcttcgctccgttttctttttgttcactcaatactgacttaccgaaaaagtcagactccttattgtgctttacagcaaagcctatacctgcttcaatcggtgtaatatcccgggtcagctcctgaccgtagagcgggagcttcgcttcaaaccggagtgtatcacgtgcaccaagaccgcatggaatcaatccgtatgcatcccctgcatcgatgatttttttccaaatatgcatagcatcatcactgcggcagtaaatttcatacccgtcttctcccgtatagccagtgcgtgaaataagtgctttgcggccgctgatatcggcttcatcaataaacgcaaacggctttaatgcagacacatctgcatctgtcagattttttaagaccgcttctgctttcggtccctgtacagccaagagcgcgatttgatctgactggttgtcaatctgtacatcacctgctgcatgttctttcatccaagccaagtctttatctatattagaagcattaatgacaagcagatagcggttctcttctttttgatagataagcaaatcatcgacggttccgccatccgggtaacacatcgctgtatattgagcacggcctggcgttaacgcggaaacatcatttgtcatcaatctttgcaaaaaagacagactgtcgttccctgacacttcgacttctcccatatgagatacatcaaacaaaccggctgcagttcggacagcctcgtgttctttttttatagaagaaaattgaacaggaagctcccagcctccaaaatcaatcgtttttcctccatattccttatacaggtcaaataacggcgttctgttcagcatctaattcctcccctttatcaacggcgcagctaaaaacatacaaaaaaggacagagaaacacctcatgtaaaatgaaggttctctgtcctggcacctgaaagtttactttgcatacgcaaagacgtcccctttggtggtttgcgcatccgcacaaacactctccagagttgcgtcgagcaagagttcttttgcctgagagattcactccgcagtttgctccttcggcgcctgtatcccgaggttttcggtcaggtctctccccttgctgtcattcgctcatattttcatgctgttatggacatactatagcaatatcttacatcaaatacatactcatatcctaccatcatcactatatgctgggcaacagcaatttgggcagatttttcttatattattcatcttaagaatcgaagaattagaaaggcggtttcaaagcaatgaatacagaaatgatctacgatgcaaaatggcctgaagaatttgctgaaagactgaaaaacgatggcccttgggcaaactgggaactgtacaagctctctgcagaaatccagaaaacattagcaattccagattttgaaggcttacgggctcctttatatctgccttcctttacgccgctcccccaccagcttgaagtggcgcaaaaagtggttgaaaaaatgaacgggaaagcgattttagcagatgaggttggtctcgggaaaacggtggaagccggtttaattttaaaagaatatatgattcgcggattagcaaaaaaaattttgatccttgtgcccgcttcccttgtgtcacagtgggtcaaagagcttcaggaaaaatttttgattccggctgttgaacaaaagaaaagctatgtgtgggagcaatgcgatattgtcgtctcatcaatagacaccgcgaagcgctcgccccatcgagaaatcgttctgtctatcccatatgatcttgtcattattgatgaggcacacaaactgaaaaatagcaaaacgaagaactatgaatttgtccggaatctcgtaaaaaaatattgcctgcttcttaccgcgacgccaatccagaaccgtatcgaagagattttcaatttggtgtccttattaaaacccggccatttaggcagtcagaatcactttcaggaggagttcgccaagaagaaatccagtttagaagcgcatgaacatttaaaagatcttgtgaataaagtcatgatccgtaacaggcggcatgatacagggctgaattggaaacagcgccatgttgaaacagtgccgattcaattttctccatcagagcaggcgctttatgatgaaatttctcgcttgaaggaaagtatcaataaaccagccagcatgttctcgattatgaccttgcaaagagaatgctgttcgagcagagaagcggtgtatatgacgctgaaaaagatgctagatcaaaaagagaaacaagcacctgccattgatgaggatacgatttcagttttaatagatcgcatcaatcaagtgacacaaaactctaaagcgcttcaagtcgttgatttgatcaaaaaaatcgacgataaggtcatcatttttacagaataccgtgcaacccagatttatttgcagtggtttcttcagcaaaacggcatcagttctgtgccgtttagaggcggatttaaacgtgggaaaaaagactggatgaaggatcttttccgcgggaaaatccaagtccttattgcaactgaagcaggcggtgagggaattaacctgcaattttgcaatcatatgatcaactatgacctgccatggaacccgatgcgacttgagcaaagaatcggaagaattcacagactcgggcaggagcgtgacgtgcatatttataacatggcgacaaaacatacggtggaagagcatattctaaagcttttatatgaaaaaattcatttgtttgaaaaagtggtcggtgaacttgatgatattttaacgaaaattcaagtgaacaattttgaagagcatctgcatgacattttgtatcactcagcaacagaagaagaaatgaaaataaaaatggataacttaacctcatttttgtcttataaaaaacagcagcctgctgaaaaaagaggatcttagcctgtaaggaggttttattagtgagacagcaagaggttcacgattttctgctgcgtttttttcaagcaaacagctgccaaatcgtcgatcaaggcttaggctatatgacagtgcagcttacagttgaaatggacaaacaaatcatgaaccgccctttctactggcattggcgcgagaagacaggcggtgatccgaatccaatgaaaatcacttttattacagataaagaaaatgcgccaaaagacctagatggtgaatttatatattttggggccccgcgtctttttcaaatatttaaagctgttaaacaaaatgggagatttaccagaatgtatgagaaaattgaatcagccggagctaaagtcccacttcagccttggcttggtataaatgtcacgatttcataccagtccgacatgaaaaaggataagttattgtcactaggtcttcacctagtctctggaacgataattgaagattttcaaagcaagctgacccagttttcactgacgtctcaaatatgtgactattgcttcaccatttcacctatgatcaaaccagaaagcggacttaagcgtatggaaaactatatttccaaatccgctatgcaggagccatccgactgggcggaacaggcggttaacaggtggaagaatgatatgacattgcttgataagttttacgagcatatagaagaaaaaccagaagaataccatctagaaaaacaggcgctgaaaaccttgtatcaaccaaagatatcagttgaaattgaaaatggcggattgttttatctgcaaaataatatttcaagctaacttttttaccattcgacatcattctcgttttttttgagaaaatacgattataataaaggtatattggaaaaaaattctggtgatttaatggcaaatgacttccagagactaatgaagcatacaataagtcatggccggactggctgaaatacataaacaagtattttaggaggagaaactgcatgaagaatgcaaaacaagagcactttgaattggatcaagaatgggttgaattaatggtggaagccaaagaggcaaatatcagcccggaagaaatacgaaaatatttacttttaaacaaaaagtctgctcatcctggtccggcagccagaagtcataccgtaaatcctttctgaatgtgctataatatcacaaggaaggtgatgacattgattggccagcgtattaaacaataccgtaaagaaaaaggctactcactatcagaactagctgaaaaagctggggtagcgaagtcttatttaagctcaatagaacgaaatctacaaacgaacccctccattcaatttctcgaaaaagtctccgctgttctggacgtctcggttcatactttgctcgatgagaaacatgaaaccgaatacgatggtcaattagatagtgaatgggagaaattggttcgcgatgcgatgacatccggggtatcgaaaaaacaatttcgtgaatttttagattatcaaaaatggagaaaatcccaaaaagaggagtagtgcctgagcagaggcactaactcctcttttgtcaataaccatcgagacggcccagtatatgaatactgggccgtctctttttatggctgttattaatttttatcctcgctgtgcgctttttcattttctttcacataaccgtctttatcagtatggtcctttttgattgtcaagccgttccactgtgtagcttcgaacgagaattgaagcttaatggagttgccttgatatttattttgaaccataagcccgttttcatcttttgttttatcatctttgaattggatttccatttgaacctgatcgaagtcagttggtgtttttggaacaccatcatattcaggagcggttttaccgtcaattgttgctacattgactttaccgcttgcatttaagaatttagggtcaatttgttttttgattttttcagtagccgctgcatcatttttagcagacatcaaatacaagtctttaaggttcgcatcatctaaaataatgtttttcgggtaaccattgccgccctcttttccaactgtcaacaatgtcacttcaaactggctgaggaaatcttctggagatgtattgctgccgccgtttgctttaaaatctccataattaagcgccattaaaacttctttgatcgcaagtgatccgttattttcaaattggaaatcctttgtcaacttatctcccggctttagatttgataagttcacactcgctgaattctctttagcagataaatcaagcgtacctgatgcaaaagtagcatcctttgatttaatgtcgttaaatgctgcccatgttcctcctccaactaaagctaatcctagtgctgcagaagcaactcctaaactcaatttctttttcatacccatggtaaactccccttttattgaatgattttatatcgaaacctgttgccaggtttacaactgaagttaagtagacatggtgctgtcctttgtatctgtttccaaggcttttgtctttctttcaatttctctaatggcgctgctgatcgtcacaaaagcgtacactaacagcatcacgccgggaacaatcaataatacagccgttccaatcggctggctggcaaaatgaagcatatagcctgcatatggaagctgaaaacctgtgtattgtgcgcgaacattttcgtccgatacaggcgctgaatcagctgctgcattattatcaccttttgttttaaataacaaatggtctccttgctttgttatgtcaacaattctgtgggtgacagccgtatttgcatcctgcataaatgtaataacgtcacctttttgaagctctttcacatcagcgatttcttttaccaatattaaggaacctgtattgaactccggctccatcgaacctgacagaactgatttcagcgtatacccaaacaccgccggctctcccccggatgaacgtgttgaaatcacgacaagtgtcagcacaataataagagtaaagatgatcacgtataaaatattactgatcagcttcattgcttttttcatcctcttccccgctttccttctggtctgattgagtttcattttctttggttacagcttcttgagatgtttcttctttcattgttttttcctgtatatccttttgtgttgtttcattctcctttttgacgtccgactttgtttcttttttagggactgtcggtttttcatcgcattttgcaagcgtcataggctcggaccactcaaatgtactgccgtttgccgggtagcctgccggtttatatactttaaatgcataaatgccgggtttcatttttttcttcgtctcaattttataaagtgaatcgccgatttgattggagacaaatcctttttcgatcacgttcccatcctttaacggtttgcgggcattttcaagcttatgaagctcccacttccactttgatttcttaagtttctcacctgtattttcgagcacagcaaataaggcgaaaggtgagcatacagtgcctttcgtatccgtttgatctgatatgtgcaaatcactttgatcccagcgtttatcataatggcagtttttatctgtatgctgaaagtctttacacgtttgaagtgagacatcaaatgtttcaatatcatgaaaagcagcgcttgtatcatcggaaaattgtaagcatattgcggcagtcagactgaaaatgactgaaagctgaaagataagcagaactttcagtttcgtcttcgccttttgctgattgtgaaacaatcgaaacatatcttacctcctgtaaaacactgtaacttgatatgacaatcgttctctttaaagaactccacaaatagagtataatcaacgatttatagatttaaaaacaccgaaatcgctcatttcgttcgtttaaaagaatgttttcatcatattacaaagtcttgctcagtattgctcattttttcaattttttagaaatttttgggattgttatgtgagaatttaaatgcatatcccattattatttggtaataataaacaaagaaagggtgacagcatgatgatcaaacaatatgtgatttgtctatctcttctcgtctttggcaccacagccgctcacgcagaagaaacaccgcttgtaaccgcccgccacatgtccaaatgggaagagattgctgtaaaagaagcaaaaaaaaggtacccgctcgcacaggtactgttcaaacaaaaagtatgggaccgtaaaagaaaagatgaagcagtgaagcaataccatttaactctgagggaagggtcaaaagaattcggcgtttttgtaacgatttcatttgatccttatagccaaaaggtcaataaaattgccatattagaagaatatcaataaggtcctccattttttgaaggaccttattcatttatttgcggttattttttccgtttcagccaaagtcggaagccatagggtaaaataccgaaccactgctgggaagcaggcgtttttgtttctttccacacctcttttcgttcttttcgctcatctctcggagtatctatatatttgacaaattgctgcgtcatatatttaacataatcattcgttttcacgtgatcacctcatcattcaattattatgagtgttgtctcacatgactttttttataccctttacactgttttattctgtccatctcagcagctttttctgtttttggtcaaacacgatctgtgcagttctttctgttcccgactccgttgacactcttaagttgatttctttttgttcttttatcgatgtatcatgaatgtaataagaaacccgtccatatggaaattgctgcgtaccctcctggcctttccgttcctctagaacatgccgaatcgaaagaagcaccccattttgaagcaaattctctcctatgtataactcttttgtttccttctcaaacatgcagcgtgaaatatattgagcagcagcaaagttcacgattaacagcacaagcgctgacacaaaaagaacagctgggtaaataaaccctcttgtacaatacattcacccccctcctaaatacgaatagactggaaaagcagtttgatacactttttggtcctcactctcaattttcagcaaaacaacacaattttcaaaatcagctttcatggcagtaatatgatctaaaatcggaacatgccctttaccatccactctttttcttatcattgaatgataaatttcgaaacggatgtcctgcccggaaagattggtgcagattaacacgctcccatgctcggctgtcttaactgcctgtgactccttgcattcattcatcatctgttctatcgaaatcatccattcttgctgtgtgaaaccgtcatgttcctgctgtcgagacaaaaacagatggaaaatcgcagctaacgatcctgatatgagcaaaaagactgagagcgaaaataatacgttaagaagcgtatagccattctgtctgcaggatgctgaggcaatatgatttctctttataagctgtggctttgatacatacgttttgatattcgccctcctcctcccacttcattgcatagatatgattgttctttgtaattgtttttgacgcggctccttcaccactcatgacatatttgctaatgctctcattcatcatctgatagccgatttctcgtgattccgccattttttcatcagctatcagcttgtcccacaaggggacgactgtcagcagcacaaacagccacaggcttagcgcagacattgtttctattgtagaaaaacctttattttctctccacattgactctcccgctccctagataaactgttatatcatatacggcatggccatttactcgtatttttccgcctgcattcgggtgccctttctcattaaattccaaacggtcttttaatgtcagcagttctatagaaagtccccttgcatacggacgttcaatgaccgtatcaccaatgactaattgatattcttttttatgaaagaaaatttttgttctttgttgacgggaaatagcaacctgctgtgtgagcataatatcatttttcagctgccttgctgcctgtcggacagctgtattgtcataagcaggaggaagtgtagtgaagacggccaccaggaggatagaggcaaggcttaacacaagcaaactttctaaaagggtaaacccctcctcctcgtttaatttaatgttcaaccttaacttctccgccggtgatgataatgcgcttaccatttggacagacagcatcgtttttcacatagccctctgactgtaaatcggcaaggctcggagtttgtccttcatgatcaagctcaaatgcagtcatttgtgccttaaccatgttttgtaagccttcacagccctttttttgaatggtttggttatgtttcgtgacgttcggtatcgtaattaaaagcaaaatcgaaataataaagagcacgattaacatttcaacaagtgtaaatcctttctcattcattagcctcttcctttcacatttgattcatcatctgatacataggcacaagcatagataaatacacaagtaagatcatcgctgcaacaaatccataaatcattggctgaaggatgcctgtccatttttgcgctttgtgttccagccgctgtaatatgaattggctgtatgtgaaaagctcccgatccaatcggccgctcagctggccgtgagatatgacttttgataaatcagtttcataaaaagggcttccacaaatagcggattcaattgactcaccggcttttagccgttcaatcaattgttcagcctcgcagcggtagaaagggagaaacgtttgatgtttaaatgcattaaggctgtcataaattgagaggcctgattttaaaaggctgcttagctgcaaagaaaaaaagtagctgttaaacagcttgacaagctttccaaccaaaggaatcctgatacaaatcagcatttgccgggcaggtgattttttcttaaacacaagccaataataaatcccgatacctgctgtaaaaagaacaagcaaaatgatcacaagatcaatatgctgaaaaaaagcaaaaagtatatcggttgaacgtgaggtttccatattcatcgattgatagataccggaaaactgaggaatgatgatggactgtaacatataaaacatgacagcgaccgtaaagatgaggaaaagcggatagcgcagcactcttttcagctggtctgcctgtgcaatttttcgttccagcagctctccgctctggatcatggaagcaggcagttcaccatgtgtttcagcaaaataacaaatacctacggcttccttatgaaatgacaaactctttagtacttgataaaacggagccccttccctcaaacaagtgaccgaatcagtcaagtcagccgcctgcctcttattcatctgaagttccatcaggcgtaatccatccagaagcgtatatccgcccgcagtcatttcaccgagcctctttaataacctcgcttgatcctttaacgaccagacttttctaatctttttcatgataaacccaccggtcatagttgtttgtcgttaaatagccgagcgcaattccttttctgataatttgacgaagcgtttgatattggtaatttgcatgatttccttttgcctcctggatacattgctgaagatttttcccgtatagaagctcataaacgctagctctcctggtatttcgtgactgtcggcaatacactgatgaacatccgttttcacaaaacgggcaagccaaatcaaccaagcgctgagccgctattgcaatgacagtctgttcgatttcattcatattgataccgaattcaagcagtctgtaaattgcgccctttgcgtctctcgtatgaaggctcgttagtaccagatgtcccgtcatcgctgcccgcaccgcaatttcagctgtttccgcgtctctgatctcacctaaaataatcatatcggggtcatggcgcaaaattgctttcagacctgcggaataagttacaccggctttttcattcacctgaacctgaagaacatcttcgtcccttgtttcaacagggtcctctaatgtgacaatatttcgattaaagtgtttttttgcatattgaacgagagagtatagtgtggtagtcttccctgaaccagttggcccggtaaaaatgagcatgccatgggaatgttttaaaaacgagagtaatgtggctcctgtcttcggaaatagcgacaatttatcaatcgaagggatattgtattggggcatcactctgatcacgaggctttcttcattaattgtgggcagcgttgacattcttaaatgaacatttccctctttcagctttaacgtaagcgaaccgttttgcggctttcgcctttcacctatatccattgctgaaagaaatttaaaatgtgaaatcagccttacgcactcttcttttttcatgtccctttttttcagcaaggcatgatcgacccgaaaatgaatgatagcgtcccgctccctcggcacaatgtgaatatcagaagcctttgttagatatgcctcttcaatcaagtttttgcttaccttttctattgaatccaatttgattccctctcctttcaacgcatattgtagaaaaagaagaaagggtaatcaaacaaggaaaacgtgattttgtgagatgttatatgctgaaaaaccaattctttctggcaagaaaaaaaattttcaactgaatgtgccgctgtcattataattttccctataaataaaaaagcagacatggtcaccatgcctgcttgattccattttcattatgctgttttcgctttttgaccagtatctttttcaacggaaaggtcgcctaatgcaacaataccggtcatttggtcattttcaagaatcgataaactgcggatttgatgctctgccataagcgccttgacatcgtatccggtcaccctgatatgtctggtgaaaaagcggggcacgctgcacaaaatatgaaacatcctatagagtccgcctttttcgaggtttctttttcttcttccgctcctgcagcatatctcccgtccagccttttttcctcaaatagagatagatcaggactgtagatgtgacaatcaataagagagaaaagagatatccgtatttccaattcagttccggcatcactgaaaagttcatcccccataaggcacccagagctgtaatcggcgtaaaaagcgtcgtgaaaatggtcagtgcttttacaatttcattccccctgtgtgaggtaatgacttcctctgaatgcagcagattgttaagctccccttcaaattcgctgatgtatgtaaatcccctgtcaattttcagttgtgtccgctgataatcctttttcccttcattttgaggtaaaaaggtttctttcaacgccatttcaatttttttggcgcttaatattaaatttttccaaatcatcagttcatggcgcaggagatggacgcggtttagaatgcttttgctattgtcgtctttaatttgccatctgagctttctcagctttacttcaaattcatcaacaccgattaaatacgcattcattagttcgccgagaagaattaaaaacccctctatcgcattgtccgctctttccatttgccggacaacttctttgcctttaatctctctcaaaatcgaaaagtcaaaattgattgtgaaaaaatattgtctggtgatataaaagtgaaaaacagtatggtctttttcttcaccaagcccctgatcataaacaatcgacccaaataccgcttcattttccgtttcagttgtatctactcgcaaaaaattaacgtgatggttattttcaaaccacttttcacactgaggccagtgagaaaaatggattagatctcttgccttacttctttcttgaggccccatttggtaccaaaaccaatcctttcctgtatgtgccttcatgtcaagatcctccaaacttttgttctttattctttaattgcccaataaccgcgtcactaaaccagtctgccgcttcaacacatgttttatgagcattttcaggtggtatggaatgtagaaagacatcggaaaagggaggtgcatgccttccttggagaaggcagttgttttggaatttatcaatttactagcagtcgctattctcattttgttaacaggattttttgttgccgtagaattttcaatcgtaaaagtgcggcgatccaaaattgatcagcttgtcgcaaaaggaaagaaaggttctaaagcggcaaagcatgtcatcactcaccttgatgaatatttatcagcctgtcagctgggcatcacagtcgcagctttaggactgggatggcttggggaaccgactgtgcaaactctgcttcgaccgctttttcataaagcaggcttaaatgaatcgcttacccacctgctttcactcgtcatcgcatttttagtggttacgtatttaaatgtcgttattggggagctggctccaaagagtttcgccattcaaaaagcagaaagcattaccttgttgttcgctaaaccgcttatttggttttataagatcatgtttccattcatttggctgttgaaccactctgcccgattgattacaggagtgtttggactgaagccggcatcagagcacgagctggcatatacagaggaagaacttcgggtcctattggctgaaagctataaaagcggcgagattagaaaaagtgaattaaagtacatgaataatatcttcacctttgataaacgaatggcaaaggaaattatggtgccgcgaaatgaaatggttagtttatcactagatgaagactccatttcaaatcttcaggaaacagtcaagcaaacaaaatatacacggtacccagttgtaagagaggataaagataacgttattggcgtgattaatatgaaagaagtgctgttttccatgctgacgaaagatttttcaatcaagaagcatcaaattgaacctttcgtacagcccgttatccatgtcattgagacgattcctatttataaactactgctgaaaatgcaaaaggaacgcactcatatggcgatcctcatcgatgaatatggcgggacgtccggtttggtcactgtcgaagatattatcgaggaaattgtaggagaaatccgtgatgaatttgatgcggatgaagtgcctcatatccgcgaacttggaaaggatcattacttgttaaatgcaaaattattaatcagcgatgttaacagcctgcttggaactgatttatcagacgctgaagtagacaccttgggcggctggtttttgacacaaaacatagacgctgagcctgaaagtaccatagaatatgatggctactcttttaaggtaaaagacatcaacagccatcacattttatttatagaagtaaaaaaagctgaatagcccgtgaaaggctgttcagctgctatctttcaagataaacatggcaaaggcatcaacactcttttattttaaaccctttattggccagggctttagcaagactttgctcggttttcacattcgaaaaatccagacccagcttcacgacagtttgggcaatttccggcctgattcctgaaataatcgtctcaatgccgagcaatttggtgctgtcaatcactttaaaaatttgataggctaccatggtatcaacgataggaacgcccgaaatatctaaaaataaatacgagagctttaacgctgagcactgctccagcacagactccaaaatcgtcctcgctctgtgcgtatcaatttcaccgacaagcggaagaatcccaattccatcagtaatcggcataatcggcgcactcaattcattaatcatttctttttgcgcgtttaattgtatcatggtcacctggtgatattcttccgtaaacacttcgatgatctcatcaatgttttgattcaagatccggctccactcataaaattcctgaatgctgatgtcttgagaagaagcttcgctgaatttatgaatccattcaaacatgatgtgcctgaaagtgttaaactggccgacactttgtgtaaccgtcacttcatgaacggcacggtctctggcgcattgaagagaccaccggttgagctcatcctctacgtcttcttttctaagggattttgctacgatggtcaccaataattcatgctggtcttttaacttttgttctagtttttgctgatctttcgctgaatacagccagctgcctgttgatgtacaaactttcagccattgttgcgtgatatcttctttgtgctctgttaagtgctgatcaagagctatcatcttaatgagctacctcctgtttttgaaaaatgtacgctatatatgtataacgcgtctgcctttacacatactatgtttagattcaatgggctatagccaagcggtaaggcaatggactttgactccgtgatcgttggttcgaatccagctagcccagtttctgaacaggtgaaaaaccgaagacaagctgattcgaataaatcagcggatcttcggtttttcatcatgcagattgatgaaccgttttcttcttcgataacttcaacagttctcccgggttataaccaatcaccagctttttgttgtctactagaatcgggcgtcgcaaaagcttcggcttctcgattaaaagttccagcacctcatttaccgtcatttcttcaatgtttaaatttaaatttttgaaagtctggcttcttgtcgccaaaatttcatcaattccttctgtcgttaacgataaaatgtactttaattcttctcttgtcggggtttctctgaataagtgccgttcgttaaattcaatttgatgtgctttaagccaatgttttgtttttcggcatgacgtgcagcttggatatgagtaaaaagttaattgttgttccattcgttttttcctcctcagttaaccatctctttgtagaataactacccggatcatttttcatttaaaccatttacagaacttttttcggattatttttttaaaaacattcatacaatagaaaacacaatcaaagggacaaattccatttgtatattaataatgaaaatgtttacatttctaggtgtgatccattataataacagtcagagggactctcgggaggggataaaaatgaatcgcatgttccgggtgttaggattttggacgggaatttttgcagtcatgttttatttaggtgatatgaaagatgcttcccttttattttttggacagacgatcttatttgtgtttctatcgtatttgaacttaaccgaacgcatgtatatttatatttttggcgcttatttaacaattttcttcgccggctttacatattactcaatttttattatggtgcccggcggcggaggccattaaatgcagaaagagacaaaccttatcggtttgtctctttttttacaatgaaaacccatttaaaaacggattttggtcctgctcagtcagtacgtctgtttcaggtccatggccgcttaacaccagcgtgtgttccggaagtgtaagcagtttttcatgaatggacgtcagcagcgtctcttgattgccgcctattaaatccgtacgtcctataccgccttggaacaagacatctccggagataaccaagtctgcatctttcacgtagtaagacacactgcctggtgaatgtcccggcgtaaataatgtttccaaatgaaacggcccgatattcaactcaccgtcgccttcaattagatgatctgcaggcttagctgttacttctatccctcgcagcatgccggagccgtttaaagaagcgtccgtaagccaatttttttcattttgatgcaggtaaacagggatatcccatttttctctcacttcatcaagcgccccaatatggtcaaaatgggcatgtgtaagcaaaatggctaaaggcgtcagccctttttcttttatgtattgattgattttatgtccctcgccgcccggatcaaaaatcaggcattgatcatcattgatgagaaaatatgcgttcgcttgaatcggccctactggcattcgtctccatttcactattatcacctctttcttttttatgctcttattatgagggttttttaaaaaagattcaaacaatcgcaatgaaaacgctatcgacaaacctataaaaaacaggtagaataaaactggaaagaattgcaggtttttcaatgtaaagggggctgtgttatgttacttgtcgtgattttcggccttgtcgctcttttcgctttatggggagtcttgcgttctgttagaaataaaaatatactcgggtttttattagccggtgccaccttatttgtctttggatggtttaccgtgatgaccgtaataaacagcgggtatccaaccgcacattaaaacctgtatccgatcggatacaggtttatttttatggctgtaaatgtttattgacactttctattttgctctcaagcgtcgtttttttgtcacgcctgtcatcgatacggatattcgttgccactctgtgcaatcctttttgaaatggcgcttcgtgaattgcctgaatgactgcaaaaaggtcactgagttctccctcgatcagcgtattcatcggtgtcagctgatatttgattttcccttctgcttgatatccttctaatatcttttgcacatcggctacgtaagcactgacactgggtgtttccgtaccgattgggataatggttacatctgcgatagccatcgttattccatctccttttgatcaatgatgagttgcttcgtttcatgtgatttcaataaaataatttgctcaaaatgaaagccgtataacgcatatttcccgttcggagatatttgaatcggctccatttcccgcagagacacaagatcttttgtctctcccgatgctacattgattgctgcgagcttatatgcatcgccgctttgtttgaatgtataaaacaggcttcctgcttcatcatagtcatactccattggagccaaacttgtatatttcgcttggagcggccatttcgctgtaacaggtgatgttgattgcggcgttttaaactgatacgtcccttttcctccggaagctgatttgacagtaaaactcatttgatggaaagaatcgaagaatagaacgttatcctcaagcttctgttccgtcttagaagctgtatcgaacgtatataaaggccctgttttatcgtctcttccctcttttacataatcaaatgtatttttggatgtccaatgaatgaacggaacctgtactgggcttaagaaagattcgtcttttttagcattcacctgatatgtatggaaatcccagttttcattgaattccgtcaccatcatttgataaggatcatactgattccaagcagcttcaagctcatacgtttcgtaatctttttcgtaaagcgtctctccttctgcattaagcaaaaccactgccgtcttttggctatgtgtgatttgcagcagaatcatctgctccctcgcattgatttgaacatcaacgatttgaccatccgtttgatagagctttttcgctttgcctgtaaagatgcggtacgcaaaaagctctgttttcgtcggattagacgcagtatataatattgtgctgttattcagccagccttccaccccatccgctttttccgcggaaagcggtatgatgtcttttttctcatcttttgccgccgatgcctgtttttgctgctgatgagatggttcgcatgccgataaactaaacagcaataccgccagcagaataaaacaaactgatctcatcagcattcccctccgatcatctttattctctcatatttgcttcggcagaaaaaagaaaaagtttcagttactcatgaaaaaataacgccctccacaagataccgcttgtggcgttatatatgtgtgaaaactgctgaaacggcaaaggattttggccttttccaagttccaccgtatacccttccttaaaataatggtgaataaaccagtcacgaaatccagcatagctatctatatcccttactcccttataaatgttcccgcttaactcctcaaaatcctttatgacggcagcagattcctcaggctcaaggcctttatagccccaataaatttcttctccttgagtatgaagagccagcagtctgtcaggcggattctccgtgatcagccggtacatcgcaatagattccggctccgtaagcggagagattcccggaaaatcgcggtagctgggtgctgtcggttttcggtatttttcaatttcccataatgatggaaattgtttatttaaatcaaccccgtttatattcgccttccattcattaaaatttggacgatgttcatttagcctttcgagttcatctcttctggctcccatgacttctgatccgtttaaaacaagatcaacgccatccggattgacaagaggaacgagggataaggatgtgctgttaaacagctttatgggagaaaagccaaagaaaggcgaattgcagcataatgacatacagtattccttaaaccattttagcaggacagacgttgtaatccactcattcgcatgaaatgacgcgttcatatggaccttttttacggcatgctccccaccagccttcagctcccagataggcctgccgagtacagaacggccaatttcccggcatgagacaaacggaaaaacatcaataatcttctttatttccttttcaacagctgaatcatcatagattttctcttgctcaatccagctatctgaaagtttcagctgccgaggctgtaaaaagcgctttatgtcctgaatggtttgaagctctttgccgctatgctcctctatcacataaccagggcaatacaattgatgtttttgtgcggagcgatttgcacttttaagcaattcctcgtctatcttcagttctttcgccacattggccaaattgttcttgatctcaggtttcacagtaataaacgccatcatcatcccccttttttgttactatatgacagcgtatttaaaaaaagaaagcctcccgctcacttcaatgcgggagacattgtgattatgatgcctgatcaagcatttgtttttctttccgctttgacgaattgtccagccttttctggtcataaaatcgcaacaaatccccataaatgatttcatcagaaagtgatagctcctgttttgctttatcagcaaatgcttcacattgttttgtctcttctaacggttttcccgtctctttgtcataacacgcaccgtctgtataaacaacctgatctgtgataaagctcccgtcccggagcaccgtgaagtccagtttttcgtctgaaagcagatcgttgccgaattgaatttgatctttcgtatcaatccctaaaagattcatcagcgtcggcctgatatcaatctgcccgcctactgtttcaatggtttgcggctttttatcagtaatacccggaatatgaatgaccagcggcactttttggagctgtacctcttcaaatggggttatttcttttcctaaaaactgccccatcgcttcattatggttttctgatataccataatggtcaccatataatacaataacagagttgtcgtataacccgtcttccttcagcttttcgataaaccgtttcagcgcctcatcctgataacgcactgtcggaaaatatttatttagcgtctggctgcttgaatcatattcatcaatcaattggtcctcttcatcaagatcaaacgggaagtggttcgtcagtgtaatcagcctcgagtaaaacggctgaggcagatttttcatcagctctgaagactgctcaaaaaattctttatccttaagtccccagccgactgaattttcgtcagttacatcatacgagttaatatcaaaaaacgaatcatatccaaatgagtcgtacattaaatcacgattccaaaagctcttattattagcgtggagcaccgctgaatagtatccgctgtttttcaaaatttcaggagcggccatatattgattgcccgcattcgtaaaaaatacggcacctcgtccaagcggatacagtgaattgtccacgataaattcagaatccgaggttttcccctggcctgtttggtggtaaacattattaaagttgtagctctgttttataaagtcattcagaaaaggcgtgatttcttctccattcaatttttcattaatcacgaagctttgcgtcgactctaaggatacgagaatgacgttccttccttttgcagcgccgaataagcgtttgttggcatccttcacattagcggttacgtagttttcaatctccgtcaggctgttgctgtctgccaacgctctctgtgcggattgctttgactgaagaacgccatcgtaaatatgaaaattaaacaggctaatgtttttaacaagcatttctctgtcaaatgagcgtgtcaatagctgaggtctttccgcctcagacaagcccaggttgaagaaataaacagaagcaacgaacaaaaaataagccgcccgttcatttttcgttgagggaatgtccgattgaaaagctttttgccggatgtgaagccatattaaaaccgcaatatctacagctaataggaggtctgtcggctcaagaagtgttccgatgctgcttccgagatcacccatattgctcgtttgaaaaagaacagggattgttaagaaatcattgtaaaaacggtaaaaaaccatatttgccagcaatacaaacgtgacaagacagctcatcgcgataatgtagcgatttctgtttttgccttttaaaaacaggctgaggccaaaaataagcaacaaaaaactcaatgggttgataaacagaataaattcctgtgttagattgtcgattttaatatgaaaactggttttgtaaacagcatacgttttcagccacatcaataaaatggcaatcagcataaatgaaatcttcgaaaaaaacgtttttcgcatttcaacctcctatgcagcacgctcaaaaaaatcagtctattcccaacattctcattaacacatcaaattaaatcttaacctgagcacaacaaaaaatcaatttcatttacacaattttaacaattttgatgtttcagccattcatttttagcgatccaagcgcctccgataacgccggcatcatttccaagtgctgcgattgaaatatcagcagcttgggctgcccgcggaaacgcgcatttgcggaatgttttctcgacttttgatctcagcagttctccggctctcgatacgccgccgccaagaacgattttggatggattaagcgagcttgccaaatttccgagcaccaaaccaagatgcttggctacataatcaaccacctcaagggcaatttcatcattttcacccgccgcttcaaacacatcccgcgctgacaattgttcggttgcttttaaacgtgtcgtctttttagcatttgctattttttcttttgcaattcttacaattccggttgctgacgcaattgtttcgatacagcccgttttgccgcagttgcagggcgctccgccttcagggatgctgcaaatatggccgatttctccgccggcgccatttataccatgtacaatttcaccatttgcaatgatgccgccgccaactcctgtgccaagcgtcacgagaatgacgtcttttgcgccatcacccgctcccttccacatttccccgagcgcagcaatattcgcgtcattttctataacagctgggatgccggtttctgtctccagatggtttttcaaagcataatttttccaccctagatttactgtttcataaaccactcctgccgccatatctacagggcctggtgcacccattccgatgtatttgatgatgtgcttcggtttttgcagctcatccagcttgctgtcgattgtttttgcaattgtgacagtaatcgtgtcgccggttttatcagtcggaacttcccacttatgctgaatttcgccatattgattaataaaagcgagtttaatcgtcgttcctcccaggtcaatgcccgcaaaccatatctcgtccatttttatcaccttagcctttataaaaatctcttccgttttttgtttgttccaattcttttcgaaggacagctgccgctctggcccactgctccttttcaatcatgtggttcatgtataattcctttaattcatccagcataaactcaatttcaagctctctgtctccaaaataaacaatgtggccaaacgtttttaacagctgctgcacatcataaaatgtattcattttcctcaccatttcttgaacttaactatcataagcgtattcataaggaagcggtcagtcaagaagaaaacgctgacaaaaaagccagcttcctttccatattccacctctatgattctttattgttttcaatttgccgctgcagctccttgtagcgctgctccttcggcttcagtttcacagccgtctggatggccttttctgcttgtgcaagctcatttttttccgcatacaataacgctaaattgtaataggaagcatggtctttaggttcttttttcactgctcgttccaaaagggaaaccgcctgatcatattcgccgatttgaatatcagaaacagcaagaattttcaaaagatcggcagaggcatctttttgcgctgcttctccgttcagcaattctgttacttcttcatactttccttcctgatacagctcgcttgcctgctgaatcagcgctgactcctggtgtgaaggcgaatgcaatccgtaatataaaaatccaacagccaaagcaatcagcaaaaccgctgacaacaatctttttccaaaggctccggctttaggcaaccccagtgctgctgcagcgaaaaagccgccaatcaagccgccgatatgtcctgaattatcaatattcgaaaccgcaaaaccaaagcccagattgatgataataatgacaataatattggttcctatagttcttaaaaacatttttcgattagacaaagcaacatacagtaatgcacctaagcatccgaatatggctcctgatgcccctgccgaaggatacgggctgaacacaaaactcgcaatcgaacccgtaatgccagcagccagataaatcagcaaaaatctccccgatccatacatccgctcaaccgctgtaccaaccgaccataaagccagcgtattaaaagctaaatgcgctatgccgatgtgaagcacgatcggtgtcagaagccgccaccattctccttgtgcaatcaggctgttttcttttgctccaaaagccaccagtgtctccgtattagtgctgcctccgtttatttcgagcaagaaaaacatcaggatctgaagcgcaataaataaatatgtaaaagtcggttttccgttttgaaaaaccgccgcttcagtttttctctgttcttcttgtttcagcactagcgaaaggaagcgttctcgcgccatttgcgcgttttcaaacgaagcgtgttcctctgaacaatcttctgtacgaaatgatggaaaaaccgcttgaagatcatctcgaagcatcgttcctctaacgatcgccggctcaactgacacagttcccttctcaaaagttttttttgcaatctcttcccagtcatcaacaggggcttccgttgaaaaaaacacattcagcagcttcatccttcgtctgcccaattgatgtctgactcgttctactcgttcggcctgctcttcgatgtctctaaccatttcttgacggaaatcaagatcgtgcttataaagacgaactagatcatgagaggacttgtccggcgcttccagccatatttcatctgactcaccggcttgtatgacgccatacccgctattcaccaggtgcgccgcaattttccaatatgtatactccagcaaaaacatgtttaccgctccaatagtttttttttcattataacagctggcgctccgaaacgcctactgaaagcaaaaaatcccgtttttcacgggattttagaaagcttgctgtataaacttattgcggataaatggaattcttaaaaacaaatggataaaagaccgcctgattcctggctggctgagtacagtattcataagacggtagcgattttgataaaacatgacggcagaaaccgcgaaaatggcatatatcaaaagttttttcatgatatccctcctgccaatagggtttgttattctgccttatttattctcgaataagggacaggaaagttatgaaaaacaagaaataatccgatcctctgttatcagcttatgtaccgggatgtcatgcggcaaacggggtacgtgcgcaaacagctggcactccaaaagcaaagagactgtctccccttcatattcacttaaatagcgatcataatagccgcctccaaagccgaccctaaacccgttaacatcaaaacaaacacctggaacgatcaccaagtcaatttgtgatgggtttacttcttttgttttttcaattaccggctcgagcagtccggcgtaaacggtttcgagctgatcatcggtcttatatgtccgaaattgcattttcttcgtgtccggatggcattttgggatgcaaacttgtttcccttcttcccaagcctgctcaatgacaggacgcgtcggtatctctaatcctctggagatggtgaccgcaatggtgccggcattttgccactccggcagagaaaacaagtacttatacatacgttccgttttttgaagcagatcttcatttgataaagcagacagtgcctccagcgtcttttttcttaattgtgatttcatctctcatccccctcggaatagaaaaaaagccagaacctttttcaaagctctggcttttttcttacacctcaaacagcaaagctgttattttgtttcacggtgtaacgtagattttttatcacgtgggcaatattttttaaattcaacgcggtctggattgttgcgtttgttctttttagaaatatagttacgctcaccacattcagtgcaagccaaagtaatattaacgcgcattattttccctccaaactaaaatcatttacttattcagacttatatataataccactataatggacggaatgctaggctgtttttcaatgaattgctgaattattgaagatacgctcataaagctgcaaatatgatgacataatgagtcgggggtggtggagcttgaacacttgttgtctgccagcttcttttatccggcgggctttttcccggtcttttaaaaagctgtccagcagatcagccgcttcctgtacgagcgtaaaattagcgatgattgccgttttgtcatgaacggcataatcacaaaaaccacccgactgagaaacgacagtcagcacaccttgttccatgctttcttgcgcggcaagcccaaacggttcataagaactagggaaaacagccatttcacattgagacagtaacgttctgatgtctttcctattgagaaacggcaggaacatgacgcgatccttcaggttatatgccgcagctaatttctcatagcaggacagagacggcccctccccagccagcactagatagaggtctggctgacgctgcttcaagatggcaaacacctttaacagctgcgaaaatcctttttccggaacgaaccttccatatgaaaagagaaatcttctatttatgcttctttggattttccccttctcttcctccatagatgcagggcttgggataacggttatttttttatgtgctgccttattaagagaccgcttcataaatgtgcttaatacgatcaatgcatcagcggattctataaggagccgttcggtcttgagcctgtatgggtgtggggcttctcggcacaccttcttcctttctctttcaagaccgtggattgtcgcagtaagcggaaggccaagccgttgtttcaaatactgggcagcaggggcagttgtgtcatcatgggcatgaatcagatcaaagcgtttattgtgtgataacacatggcgaaccattgtaaagttagcatcagctatgtaatcttcaaacttcgcatacgaaaacagctgcccgctcggagtaaaaaccgtaatgttgatatgagggtttaaataggaaatgaggcggtttaaatggacacctagcccgcttttcggctcatcgggatgttcgggtgaaagcatgagaatgttcaccgttctctctcccctctcccataacaggtgtatgcagaaaattgctcctcccacctggtgtgcgcttcctcaatctgaaagctgtttatatgacgaatcccattttcatcaagatagatgtcgtctgtatcggcaagcttgagagagacattcattgaattcacaatactgtattcagcccgatatacagcatcaccagccgtctgtctaatcgtccattcgcctttatcatacgttgtgcgttttgtcctgacagcttcaatgtcttttcttttgatgacaatccgcaattcttttatcatatcctgcgttttttcgaaaaggacagcttcagccagccgcattgtttcttctgagatttcccagcttacggtcaaggtgtgagcgttttgaatgattatgtcgaatgtgtccctaaaaaaggaaagcttatgtcgtatattatagggaaatgggtgtttatccatggactcttaacattctcctttccaatcgttcacttcgtgttcctattaaaccattacataaagaagaagcaaagaaagatttctcgacaaaatctcgtttttttcgcgaattcctttagaaactattggttttatggtataaaaaagaaggataaaaaaagaatagaaggtgatgaaacgtggaaattgctattattgcgttgtttatcgtcagtatagcgctaattgcattctcatattctcaaagagacccgatgaaagatgtagaacaggagctcgaaacactgcagctttctgcgatgcaggaaatttacaagctcaaaaagaaaatgacagtgcttgaggaagaattactggaaacaaaccttgtcattcgcaaatcaaagcagaacgacatcaatcaaaaaatcgctaaacaaatactttctaaatataataacggtatgtcagctgaagcgattgctaaagctgagcatgtatcagtggaagacgtgaatacgattatcaaagataatgagaaggtgctcgtatgacaaaacggggcattcaggcatttgctggcggcatcattttagcgacagccgttcttgcagctgttttttatctgactgacgaagatcaggccgctgctgtaaaagataataaaacagtaactgaacaagacgtgaacaattaccttgattctaaaaaaatggtttctgtgaaccgtgatgaatatcaaaaacttcttgattcaaaagagaaatcgttgaccgatgacagcagctcagacacgaaaacagacaaagtcaaaacgtacaagctcaaaattaaagatggcatgagcactgcggatgtatctgctattcttgaaaaagagggcattatctcttcggctcaagactttaatgactatgtcattgatgccggctatcacaaagaaattcgtgccggcgagtttaaagtaaaatcagacatgagtttcaaaaagatcgtaaaaacgttaacacgataaaaaaacaggctgactcagcctgttttttttcatccaaactttcctgaaatgtaatcgagagttctttggtccttcgggttagagaacattttattcgtattgtcgcattcaacaagctcgcccatgtagaaaaaggcggtttgatcagaaacccttgctgcctgctgcatgttatgcgtgacaatgacaattgtgtatttatttttcagctctagaatgagttcttcaatttttctcgttgagattggatctagtgcagatgtcggttcatccatcagcaaaatatcaggattggtcgcaagtgctctggcgatgcaaagacgctgctgctggccccctgacagcgaaagagcggacgtatgcaatcgatccttcacctcatcccataacgccacgtcttttaatgacttttccacaatttcctgaagcttcttcttatttttggtgccgtggactctcggtccgtaagccacattatcaaaaatagattgcggaaacggattccctttttggaataccattccgatattttttcgcaaatccacgatgtccactttatcctttaaaatgttgctgccattatagttcagctcacctgcaagctttacattcggcgtcatttgaatcattaaattcaatgtcttgataaaggtcgatttcccgcatccggatggcccgataatcgccgtaacctcattttcataaatgctcaaattgatattttttaaagcatgatgctgtccataccataagttcattccattgacttgatagacttcctgtttcattacagcttcggtagcaatactcattgccgccctcctatccgaatttcccgttaatataatcctctgtcttttgctttttcggactcgtgaaaatctgttcggtctgtccgtattctacaagctcgccgtttaaaaagaatgccgtccggtcagaaacccgcagagcctgctgcatattgtgcgtgacaataataattgagtattctcttttcaatcctgtaattaattcctctattttcgcatttgaaatcggatcaagcgctgaagctggttcatcaagcagaagaacagccggcttcatcgcaagcgttctcgcgatgcataaacgctgctgctggccgccggataacgagagtgcggatgaatgtaaacgatccttcacctcatcccagagggccgcttttgttaaactttcttccacaatttcatctaaaacagctttattccgctctccggcatatttcaatgcatgtgtgatattcgcatagatcgatttcggaaatggatttggtttttgaaaaaccattccgatttctcttctcaagctgacaacgttaatattgccgcccaatatatttaatccttcataaaggatttcaccttccgctcttgcagatggaattaaatcgttcattcggttaatatttctcaaaaaagtagattttccgcatcccgacggcccaattaaagcagtcaccgcatttttttcaatatccatgtttacatgatgaacggcttgtttatttccgtaaaaaatggacagatctttgacctcaagcacgtggttctgcttcggaacaataacagctcgctcaggtttttcttttaccatttgttcagacatgcttttcgcctctttccgttctaatttgccgtaagctttttgtagatcatcgtgccaagccatctcgccgcgagattaaacacaagaacagaaatcaccagcacggcagaaccaccgttggcaatcgcttcagcatccggaatcattccttgtgtattgacgttccaaatgtggaccgcaagtgtttcagcgggcctgaaaatattaagcggtgatgtttccgaaaacgggttccactccgtaaaattaagacgcggtgttgtcaggcctgccgtaaataataatgcggccgcttccccgaacacccttcctgacgctaaaattgctcctgtgataatagaaggaatcgcacttggaattaaaaccgtttttacggtatgccagcgtgatacacctaaagcgagagaggcttccttcagatctttagggactgaacgtatcgcgtcttctgtcacacgcaccatgacaggaaggttaaaaacagttaacgcaagcgctccgcctatgatcgtatatccccagcctgttaagttgacaaacatcaataatccaaacattccaatgacaatagacggaagagatgaaagcacctctatacatgttctgatgaagtcagttactttgttattaggcgcgtattcagccatgaagaccccgccgcccacaccgagcgggattgtaatcagcattgtaataaacaaaatataaaaggagttaaacagctgatctcgtatgcctcctccagctgcaatggcgctcgactttgttgtaataaattgaaaactgagctgagaaacaccgtttataataatataggaaaacaaacctactaaaatggcagcgataatggctgcacacaaaccaaacattccggtcgccagtttatctgttattttgcggttcattacactttcctcctagatgacaagtagcgaataagcaggatgaacaagaatgacatcaccagaagcacaagccccattgaccacagcgtattgttttcaacacttccgtatgtggtgtggcccatattcagcgtgatgatcgttgtcagcgttcccgcagtgtcaaacaggctttccggcaatactcttgtatttccaatgaccatctgaacagccaaagcttcaccgaacgcccgagccatgcctaacacaacagctgtcatcaatgttggaaaagctgcaggcacaagtacttttctgatcgtctgccatcttgtggccccaagcgcgtaagaaccctctcgtaaactcttcggaagagaagccattgcatcagcagaaatcgatgtgatcgtcggcagaatcatgacggaaaggacaatcgttcccgccaataaactgtgccctgttccgctcgatttgaactgggcgataaacggcaccaatactgtaagacctatgaatccataaacaacagatggaataccgactaaaagctcaatcaccggctgcagcactttctttccccaattcggggcaatctctgtcatgaaaatcgcacctgcaatgccaagcggcgcagcgattagagcagaaagaatcgttactgcaaatgagccaaaaataaatggcagcactccgtatttcggatcagtatctgtaggattccaatttaagctcgttaagaattcaattgggcttacaccatttacaagaaaagattgcagccccttcacgccgaggaaaatggtgatcgcaacagatgccgcaatcataatcagggcacatgctgtcacaatcattcttccccgaacttcatccaattgccgattttgccttgagctgattaaacgctcgctcacagacatattttctctattgtttatcattgttttacactcctatgaatgtgttaagaggagaaacggttgtccccgcactcctctttttattaagatcagctttgcttccctttggcatcgcgtgtcactttcatatcagtaaccggaatgtagccttggtcagtaacaatgcttttttgaatgtcttcactctttagataatcaagaaattctttagctaaacctgtcgcttcaccttttgtataagaatgctgataagcccagatcggatactcgccagttgctacatttttcgcttcaggtttaacaccgtcaatagatagagcagttactttgtcatctgttaaatatgagaatgcaagatatccaatcgctcccggagtatcagcaatgatctttttcaccgtgttggaggaatcttcagtaatgccttctgcaggctccgctccgtcaagcgcatatttcacaaatgtagcacgtgtgccggaagaatcagggcggtttacaagtgtaatcttttggtctttgccgccgagctctttccagtttttgattttgccagtgaagatttttttcaattcatcttttgaaatatccttcacaccagcatcagggtttacagctgctgccataccaactacagcgacttgatgatcgacaagcgcttttgcatcgataccttctttttcttcagcaaaaacgtctgaattcccgatctgaacagctccttcagagacttgagaaagccctgttccagaaccgccagcttgtacctgtatatcagcatcagggttttcttccataaatttttccgcggctgcaagtactagtggctgcattgccgatgaaccagaaatggttaaagaacctgatgccttttcttctccttttgcagaatcgctattcgattttttactttctcctgcatttccgcatgcagctgcaatcatcataaaagcagccatcagaagcataagcaccaatttgttttttttcatttcctgaattccccctgcgtataatgtgtaatttgtcctacacgtatagagtaaaggttctatgtaaaaagggtttgaaccgaatgttaaggttttgtaaatcagtgcgtttttttgtataaaaaaaacgcccacatcatgtgagcgtttctttttagttatcagaagacgttgtgttttctgcattttcttcgattttgtttttattcttttgctgagtatcttctttgtcctgcttcgatttcagctcaaaatatttatccattacttccctgccgatttcgtttgtaatggtatatttagcgctgtaatcaatataagcccaagggactactacagagatcgcaatctcaggattatcagccggtgcataggcaacaagtgtcgtattataagtcgatgttcctgtttttgatttatcaggtccatcatagaacgattgtgctgttcctgttttaccggcaggctgatatgacgctgaagcaaattgactggcagctgtcccttttgtcatcacccgtctgaatccggcctgaacctctttaatatattcactcttcatgtcgattttattcagcacttccggctgaacggattgtacgacagcaccgatccctcttttagcatcaggttctctgacttcctttacaagctgaggctttaagcgatatccgccgtttgcaatcgttgatacgtattgcgcgagttccagcggtgtatacgtgtcgtattggccgatcgcatagtcaagcaagaatcccgtcaatctgtctgttcctttatagcctgtcatttcattcggaagatcaattccagttttgacacccagtccaaattggctgaagtaattacggaacgtatcaaaggccgtcgtatcaatcggtaaagcctggtgcggtttatattcaccttttccgagcgcgatcgcagttttaaacataaatacgttggaagactgctctaaggctctttgaatattgaccggtcctaagttagtccatgactttttaccgcgtttatcctgactgccgatatacaatggttcatcctgaaaaactgtattcagattgatagctccggtttgaaggcctgtcaagactgttgcgcctttgactgctgaacccatagcgtaagatgacgtcattgtacctaaagcgtaatcatcaattttatatttcccattttcttgtttaatctgcttgcccgccattgaaagcacttcaccgtttcttgggtccatcatgacaacgaatgcccggtctaacaattgcgtgcttggtcttgctttagcagatttgaggttcttctcaatgattttttccacttctttttgcaaatcaatgtcaatcgtaagcacgagatccttaccggctttgccttcagataccgtttttgttcccgtgacattgccgtttgaatctgtgatattttcgactttggctttttgtccctgcagaaggctttcatattggtattccaaatagctttttccgaccctgtcattacggctgtagccaagcgacagataatggtcgagcaagttggacggcaatccttcattagagctggaaacacttccgagcactgagcgaagaaggtttttatacggatattcacgttcccaatcggacgtgacatcaacacctggcagttcgtctaaatgttcacttaccactgccatttccttcgctgatacatcttcgtttttgatatattgaggggtcaatgcatagcccgaatccatctgtcttttgatagcgaggatctgcatatctttatccgtcaattcattcaactgcttatcagtaatccgttttagctgaagctggtataaatcgtcatcggatatttttttgtcttcaacctgctgtctttctttagagctaatgagctttttcgcttctttcggtctagtcaaaatccaataatcttttttatcccgttctgttactttttttgtatcgactttgatcatgtcagacagcttttttgcgatctttaagcgctgttcttgcgtggtcgatttagatctcgtgtatgtgattgcatttaaagccttatttgtcacaatggcattaaagtttcgatcataaattttcccgcgcggtaccgctgagctgacttcactttgttcttgcttattcgcttggtttttgtaatcatcaccttgcacgatctgcttgatgcccagttccacaataatccaggtaaatataacaaaggcagctaaaaataaaatattcagccggatcggaagcgacttctttttctctttatgattttgcttttttggtttatttctcctcataacatcaccttttctatttacagaaagaaaagacactcaagtaagagtgccagttttcattttaaaggttttttcgacttttttctacagataacccctttttggcaaaaaaattatctctcgccttttaacagggtcggttctgttacccgtttttggccgtcttcttccatggtttcattttccccttctttctccttaaaacggatatccttgacaaagtaataaatcaaaggatgtcctatacccaatatcgcaagtgacaaaggaattcccacatcctctttcagaagggccacaatcaggagaaagcacaaaatggaaacaattctgccggcgttcaagaacatttctctaagcacgatatattcaattcttgcttttctggcatgcctcgcgcgccctatcacatcatatgtaagtgatacatatggcacaagcaacagaggatagccgatggcaataaaaacgccatacgttaataatgtcgaaaagctcatatggaacagaatcaaaaacagcgcgccatacaaaataagtccgcccagcaaaatcgatttttttctcgcctttttcttaatcagcctggatgcaaagtagtaggcaaagaaggaaacagctgaattgacaagaccgaatgtaccgagagcaagttcgctgtttgtctcaataaatacaaacacactgattaaaaagacaaaaatcccttctctcaaaccctgaaaaaaatgcgcattcgtgattctccgccaattcatattgctatggcgctctccaaatactttgctcagcataaaacggccctttgattctctccgttttaagaaaaagctcatcacgacagccagggcaaataaactgagggagagactgaaaatcactgtataacccgtattattttcaagccttgagatcacgaatccggctacaatcgggccgatcattcctgcagaggaagacagaatgcccataaacccgttgaaaaagtctcgtgtatccggctctgttatttcaaaggtcagtacgttaaacgctagccaataaaagccatagccaactccgagcaccgcgccgattagcacgaggcggctggccgccgtttctccggctaaaagcacacttaaataaaaggcagctaaaaaaatgacgccgaaccttaaaatgaataccctgtctatttttttggctaaccgtccagccaaataaaaggttatcggctgcattgtcacaatggataaattatatatcgccaaatcaataaatttccctgactgcttccaaagatacacattaacaaatgtattggacagtgcaattcccagcgagtaaagcccgccaatggtcagcagaaagagtaaccctttgtttacgtctacatcgcctatcactttttttagtttgctcattactgactcccctttactatcccttagtctgtctcactcaaaccgagatatgtaaaaagaagacataaaaaaacaaggtcccataatgaggaccttgtttgtgccattattttgcttcgctgtatagacgagccacttcgtcccagtttacaacattccagaaagctgaaatgtaatcaggacggcggttttgatagttaaggtagtaagcatgctcccaaacgtcaagacctaagataggcgttttgccttctgaaagcggagaatcttggtttggcgtgcttgtgatttcaagtttaccgttgttcacaacaagccatgcccagccagaaccgaagcgtccagctgctgctgctgcgaattgctctttgaatttgtcaaagcttccaaatacactgttaatctcttcagcaagcgcgccagtcggttcgcctccgccgtttggagataaaagtgtccagaataatttgtggttcgcgtgtccgccgccgttgttgcggactgcagtgcggatgttttcaggaacagaatcaagatctgcaacaagctcttcaactgatttgttggcaagagcagtgtttccttcaaccgctttgtttaaatttgtcacgtatgtgttgtggtgtttcgtatggtgaatagtcatagtttccttgtcgatatgcggttctaaagcatcgtacgcataaggtaattctggaagttcgtaagccatgataattcctccttagtatatatgtactgaaatgccgcttcacagcgagcctttcttcattcaatgtaacaaaagaatgctttgtaatcaatgaaaaagctcacgatttggctcatttcagcggacatatttcactttaaccgataatctgccccattaaacctgccgccagcatttcttataggaccgtccataaaaagtatccgatcatcaaaagctgtatgatgccctttgcaataacccctgttaaaaaaccaatgagtgagccgaggccaattttaaacgctgactttaagtccttctgatgaacgataagttctgcgcaaacagccccgataaacggccccaatatgatccctgcaaccggaatgacaaaaggcccgattaataaaccgatcgtgcttccccatatggcagctttgcttcctccgaacctttttactccaagcagattcgacacgtaatctgctgcgaataatactgcggcaaaaactgcctcaacaagccagaacatataagaatacggactgaatgaaaataaaaatccgtacaatacaaatccggcaacaataaatactacgctcggaataacaggatacaccagcccgataaaggcaatgataaaaaccgctgcaatcaacagccaatacaacatatccatagcttccatcctcccattttactctgtcttcttcatgtcttccttgtattcacacgcatgcaacgatacaataagcaacatatattagtttagctaggaagtgaagatagtgaatgtgtttcagcttttcattaaaagtacatactctccccgtgatattgcaaaaacaagatttcaaggaatcggaaaagcgattctttatgtatttttgctctctgtcctgtttgcaatccctaccgcttattatgtaagtacagggaccgtaaaatcaatgaacggctttaaaactgttttaaacaaagatttccctgatttcacaatttcaaacggcaaacttcaaacggatgagaaaaaagccacggaatctcaagcaaatggtttcgttatcgtgttcgatccgacagactcctatggcactgaacaaattgaagcaaagcaaaacgcgatcggcatccttcagaacaaatttgttttggccattgacggacaagcccaagaaatgtcttactcaatgatgccatcagagttacagaaaaaagatgtcattgcagggttaaaccaaaataaagcgatgattgtaactgttctctcagctcttatttttctcgtaacagcagcgggaaaatttattgaagtatcgtttttagcgcttatcgggttaatcattaagaattcgcagaaaaaacatttatcctatcatcagctctggaagctttctgcttattccatcaccctttcaactgtattctttacaatcatgcgggcattagaagcaaccgtaccaagtgaatttttgctgaactggtttgtcaattttgtcatcctgtttctcgttttaaaagagattccgtccaaaaaagctgctgtataaaccgaggctgcattcgcagtctcttttcttttgtcatgaatcgaaatggacaagcatactatggtataaaatttcgtatgcgggaggaaaagcgatgaagcgtctcaccttagtatgcagcattgtttttatactttttattcttttttatgaccttaaaattggaaccatacccattcaggacctccctgtctatgaagcatcagcaaaaacggctgtacaagaaccggcttataaaacggtgaaggtaaagccgggtgatacggttatgtcgatagtcggatcagcaggttctccggatgacattgtaaaggattttgaagcactgaatccaaaagtgaaagctaacgccattcaagcgggaacagcgtataaattcccggtctatccttaatttaacgttaatttcttgtcagttcggcgaagacactgttacaatgtaatttgtaaaataaattcacataaaccatactagaattgttatatctagaagcggcaactacaattaaggagcgattgcaagtgagtgaaatcacacatcgtacaaaaacgcgtcccgtcaaagtgggacctttaacaataggcggcaacaatgaagttgtcatccaaagcatgacaacaacgaaaacacatgatgtagaagcaacggttgcggaaattaaccgtttggctgaagccggatgccaaatcgttcgggtagcatgtccggatgaacgggcagcaaacgccattgcggatattaaaaagcgcatttccattcctctcgttgttgacatacatttcgattataaacttgcgttgaaagccattgaaggcggcgcagataaaatccgaatcaaccccggcaacatcggccggcgcgaaaaagttgaagcggttgttaaagctgccaaagacaaaggcattccgatcagaatcggagtaaacgccggttcattggaaaaacgcattttagaaaaatacggttatccgactgccgatggaatggtagaaagcgcacttcatcacattaaaattcttgaggatcttgattttcacgatattattgtcagcatgaaggcctctgacgtgaaccttgcaatcgaggcttatgaaaaagcggcgaaagcgtttgactacccgcttcacctcgggatcaccgagtcaggaacgctgtttgccggcacagtaaagagcgcagcaggactcggcgccattttaagcaaaggcattgggaacaccatgcgcatttcactaagcgcagatcctgtagaagaggtaaaagtagcaagggagcttctgaaatctttcggcttagcctccaatgctgccacgctcatctcatgtccgacttgcggccgtattgagattgatctaatcagcattgccaatgaagtggaagagtatatttctaagataaaagcgccgattaaagttgctgttctcggctgcgctgtaaacggacctggtgaagcgagagaagctgatatcggaatcgccggcgcacgcggtgaaggactgctgttccggaaagggaaaattgtccgtaaggttccagaggaaacgatggtagaagaactcaaaaaagaaattgacattcttgctgaggaacactacgcaaaacttgaagctgaaaaagcaaaattaaaagaagaaacacaaaaagcttgacgggaacccgtcaagcttttttgtgttagaaaaatggaataataaatattccaagcactaatgaaacgacaccgatacccattgcccaggctccaaggccttgagcacctcttcttcttgcgatatagccgacaataataccggcagctcccaataaaacaggcagtacaaacaatgaaataatggacaaggctaaagcgatatatcctattccccgtccttcattgacattgccgccgctgcgatcattgtcttggtcattgctgcggtcagcagcacgataaggctctgcgatttcagcagctgtttcctcaaaaaaaccgtcattgtcgcgggtaatatttgtcccttcagatccatgatcaacatagtaactgttgttatcacgcttttcgtaatcgtttgccaccttcaattcccccttctgttttattaaaggagcttttatagtttgatccattttgcctgattcatgtttgctaaacttttctgttaatgtcaattgtttatgttacacttgaagggatgaaactgaaggagtgtgggcatgttacgcttaggaatagatattgacggcacaatcacggctcaggatacattcgtcccttatttgaaccgttcgtttaatctttccatttcattaaacgatatgacggattatgatttaacaaagctgttaaacattacccaggaagaattttgggattggatgaatcaaaatgaagcgatcatatataaggaagcattgcttgcacagcatgcgaaacagtcacttgattttctcaaagaggagcacaagcttatttatattacagcgagacggactcatttaactgatattacctatgaatggtttgacagacaaaacattcattatgaccacatcgaactcgttggcggtcatcacaaagttgaagcggtcaagaatcataacatcgacctgttttttgaggatcatcacgggaacgccatgatgattgcgaaagaagccgggataccggtgattttgttcaattccccttataatcagcttccgattgattcaaacatcatcagagtaaacaactggctagaagccgttcaatggatgaacaacaataagcatcacttaatacgtgtcaataactgaaaaaggagcccaaaccgggcccctttttcatatatacgcattttacgcagtagtgttttcttggttttccgctgtacaatcagggcatgtgccataaatctcaaatttatgcccgctgacctgatagccatccaaatcatcacaaagcttgtccatcggacatgattcaatttcctttgttttgccgcaggcaagacaaataaaatgatggtggtgatgggtgaatgaacacttaaatcggaagagcttttcaccggacagctcagttgtttccaaaatcccaagttcttcatataaagaaagatttctgtagattgtatcaaagcttaagcctggataatcatcattcagtgcagacagtacgtttttagcggtaagatatctgtctgaatcagcaaaaagctgcagcatatcctcccgtttgtttgtatatttatatccgttttcttttaataggttcagcgcttcttggacgttcatgaagggtcccccttttcgctttgcttaagaacgtatcacatgtatgaaaaagaaaatggcagctgtctgtccagcaagccattttctttactgcagataaaattatacccataaaatgaataaaagtaaatgaaagcctagtggattgcgtttttgaattttccgcctctcgtttcatgagtattcataattgttatgaatgcattttgatcaacttcaaacacgatcgatttgagctttgtcacttccagccttgtgacaaccgcgtaaattacgtctttttcttcgtccgtatatccgcctttccccttcagcttcgttgtgccccgaccgagacggtgcaaaatcgcgtcggaaatctcatcatactgctcagacacaataatgacagcttttgtttcatcaagcccttggatcacggcatcaatcgttttcatcgcaatataataagtcatgaatgagtacatcgcttgctcaggaccgaacacaaaaactgcccaaatgaaaatgaacacattgatgaacataacgaactcacctactgaaaacgggagttttttggtcagcaaaataccgagaatttctgtaccatccattgaacctccgtttcgaataacaagcccgacgccaaagccgagtaaaagacctccgaacacagtagccaaaataggctgggttgtaatggcttctacatggtgaagtgaggattcaataacggcaagcccgacaatccctataaacgtagagactagaaaggtcttaccgatatatttatatccgaagatcataaaaggaatatttaatatgacaacgaaaaaagcgaaattgagaaaggggtttgacataaagaggtggtctaaaataagtgatacaccgataatcccgccatcaataaaatcattggggattaaaaataattcaatacttacagccgcagatgcagctcctaccagaatcataaagaccctgaaaataaaatgggtaaatgtttctttcttatgttgttttgttggggtcataaaatctcctttcctgcaataactattttaaatacattataaatctattttaccattaaacactgacacattttactgatttgcccatacattaagtctggaggtggaatgaccaatgattttatttcaaagaattattttacagcggcttaatcaggctactgctgatgatttgctgaagtactcaaaacaatacggaatcagcttaacaagatcgcaggccgttgaagtagcgaacttgttatacgggaaaaatgtaaacatctttaatgagagtgaacgaatgcggctgttgaaacaagtagagacgattacatcgaaagaaacagctcaaacagttaatgaactattcaaacaatttacaagctaaaaaatgggggtgttatcccccattttttattgctgtaaaatcttttcgagcaatgtatcatcaaattgtttttctttcagcatgtcaatctcaaaacggtatggcggttttttgttctttttatcttcaccgacatatggtgtttcaagaatttttggaatgtcttttaactgctcatggtgaacaacatattgcagtgcgtcaaaacctatttcaccaaagccaatattttcatggcggtcttttctcgcacctttgacatttttgctgtcattgatatgaagcactttaatacggtcaatgccaatgactttatcgaactcattcagcactccgtcaaagtcttcgacaatgttatacccggcatcatgtgtatggcacgtgtcaaagcacactgacagctgctcattgtgtgtaacgccttcgataatctgtgcaagctcctcaaagcttctgccgcattctgatccttttccagccattgtttctaatgcaatctggacattttgattcggatcaatcacttcatttaagccttcaataatttttttgatgccggcttcagctcctgcccctacgtgagcgccaggatgaaggacaatttgcttcgctccgatggccgctgtccgttcaatttctgaacgaagaaaatcaacacccagctcaaaagtggacggatttgtcgtgttgccaatattaataatataaggcgcgtgtacgataatctcgtcaatgccgttttcttgcatatgtgcccggcctgcttctatatttaagtcttcaattttctttcggcgtgtattttgcggtgcgcctgtataaatcataaacgtattcgccccataagagactgcttcctggcttgctgccagaagcatatgttttccgctcatagagacgtgtgagcctattctcagcaacaggttcccctactttcttttcttagattggtttcttctctgttttttcttgattttctccatctcatagctcattttctttttatacccaggcttaaccttcttcggctttttcacgagacgatgagcaatttcatccgcttcattcggcgtttttttacgctttttgcggcgctgacggtcatcgccttttttccattcgcccttttcaagctctaagtaatcaaattcgatgcccattttttcaagtcttactaatgcatcctcatcagtaagctcataaatggtcatcgcttgtcctgatgagccggcacgagccgttctgcccacacggtgaacatagaaatcgagatcatccggcagctcatagttgataacatggctgacacctttaatatcaatacctcttgcggcaaggtcagttgcaatgatatatgtgaattccaaatcattgatctgcttcatgacttttttccgctcacgtggtgttaatccgccgtgcagcaagccgattttcatgcctttgccagtcagatactgggcaatatggtcagccgtatttttcgtgttggcaaacacaatccccaggtatggattcagatgcgacatgatgtcaaaaaggagcttgtccttgtcacgatgtttcgaaggaatgaggatatgctcgattttcgcagcagtcacctgttttggctccacatgggcgtatttcggattttccatgtatttcttcaagaatggtttcagcttttccggtatggtcgctgagaacacaagcatttgcagatcctcaggcatgcgggaaccgatgtaatctacatctgcaagaaatcccatgtccagcattaaatccgcttcatcaataacaagagattccgctttatgaacacttaacgcctgttctttgattaagtcagcaatccgtccgggtgtaccgacaacaagatgcggctgtattttcaatttatcaattgatttttgtttatcagtgcctccgataaaacatttcgagcgaatctgactgccttcctcaccctgcgtgattttaagcgcttcctgataaatctggttggctagctctcttgtcggagccgtaatgactacctgaacgacatccttagcaggatcgattttgtttaataaaggcagtaaataagcgtgagtctttccagtacccgtctgagactggccgatgacgctttctttttttaacactgcaggaatcagccttttctggatatcagtcggttcgtaaaaaccaaggcgatgtactgcatctataataaatggtttcaattcataaagttcaaatttcgtttctttcatttttcccagctccttaaagcggcacattatgtgtccatcatcacattatacccgattttgcttaaaaacaccacgtttgcaaggcgtttgttttattcagttatgtaaagcaaataccgcagcccatgcatattctaatagcagagagagctgaaaggaggtacaagtatgttttcaccgcagcagccaatgagaaattacccacagcccggaccgccccgccccatgccaaatcagcgaatgatgggcagaagaccgcctaatatgcgaggactttcatttggagcacagcagcaaggttttcagcaagccggacaatttcttcctcaggcaaatgccggagcgagaaatggtgcaggtgcaggcggaggcttaaaaggaatgctgtcaaggttcctacccggcggaggaggcgctggcagtgccggagttccaggagttccaggagcaggtgccgcagcgagcggaggtgctggcctgcaaggcattcaaaatatcgccaatcctgcatcattatccagtatgcttggaaatgtgcaaaaagtactcggcatggcgcagcaagtcacccctatgatccagcagtacggcccattagtccgcaatctgccagcaatgatgaagctgtacagccaattaagtaaaagtgatgatactgagacagaggccaatgaggaaagtgaaaaacaatccgtttcagaagaatcatcagaaaaagaaaaagagactgaaacaaaaacctcagatgggaacaaaaaatcaaaaccaaaaagttcttctctcccaaaaaaatctaaaacaactgacaataaagaacaagaatcaaaaacatctgcctcgaagaaaaaggaagctgcctctcctgctccgaaaagaacatcaggcagttcaaaaccgagattatatatttaacattctttgatatctgaagtgagattggctataatgagatcagaagaatgcaagaatagagccgtttgattacggctttttatattgcctttactcacttcagtattggaggacaaccgaaaatggacgtaattaaaatttcaccgcgcggctattgctatggtgttgttgatgctatggtcattgccaaaaatgcgtcactagataaaagcttgccaagacccatctatatactcgggatgattgttcataataaacacgtcactgatgcgtttgaagaggaagggatttttacattggacggctctaaccgtctggacatcttaaagcaggttgacaaaggaactgtcattttcactgcgcacggtgtttctcccgaagtcagaagaatcgcagaagaaaaagggttagtcgcaattgatgctacatgtccggatgtgacgaaaactcataatctaatcttagagatgaaagaaaaaggatatcacgtaatctatatcggcaaaaaagggcatccagagcctgagggagccgttggcgtagcgccggagatcgttcacttagttgaaacagaagaagatgtaaagaaccttgatatccaagcagagaagttaatcgtgacgaatcaaacaacaatgtctcaatgggatgtccacgacattatggagcttgtcaaagaaaaatatcctcatgtcgaatatcaccaagagatttgcctcgctactcaagtgcggcaggaagctgtatcagagcaggcaaaaaaagcggacttaacaatcgttgtcggagacccgaaaagcaacaattcaaataggcttgctcaagtgtcagaggaaatagccgggacaaaagcataccggatcggcgacttaagcgaattgaagctcgaatggctgaaaggcgttaataccgttgcagttacagcgggagcttccacaccgacgccgatcacaaaagaagtcattcgctttttagaacagtttgatcacgaagatccatcaacttggacaactgaacataatataccgctcaaaaaaatacttccaaaagtaaaagcaaaaaactgaggctgtaaaagcctcagtttttttatagaaatgtaaatggatttgtatctgtttcagaaacaaagatattcacgtcaaactttttatcattacacattgatgtcagctttctcgtgacgccttctttcatgattttttccgcatagtgtcccggatcaaccacatttaggccaagcatcatggcatcatgggccacatggaagtataaatcccctgtgacgtaaacatcggctccctttcgttttgcatgatgaatatacttgtttccatctcccccaagaacagctacctttttcaccatgctgtcagcatcccccaccattctgacaccattgacgtcaagcttgtctttcacaaataaagcgaattccttgagcgtcatctcatttttaagggttccgacacggccgagtcctttttcggcaggagtctgttcaacaggatagatatcgtaagcaacttcttcatatggatggctttttatcattgcattgataacagctttttcgacgcttttaggaaatacagtctcaagccttacttcatgaacaagctcaagctctcccacttcaccgataaaaggcttagctccgtctaatggtttaaaactgccgattccttcagatgaaaacgcgcaatggctgtattcaccgatatggccagcccccgcatttccgagcgcggctctgacctgctcttcatattccttcggcacgtatactgccagctttttcagaggatccgtataagtaggcaccagcacttccgtctcactcagctctaatgcttcagcaagcaaatcattcacaccgccgtccgcaacgtctaaatttgtatgagctgcataaacagcaatatcatgcttcaaacacttttcaattaaccttccggcaggctgatctgttgaaatatgctttagcggccggaaaattggtggatggtgtgcaataatcaagtcaacctctttttcaatcgcttcatcgataacgctctctaacacatcaagtgtaaccatcacatttttaattggtttgtttaaggtgccgatttgcaggccgattttatctccttcaaccgcataggctttcggggaaaattgttcaaacagctggatgatctgctgcccatttacacttttagccatgatcgattacctcctttaacagctccattcgatcggcgagctcctttaatttttgtttgttttgctctgtatccgccgcttggctgatctgttcataaatgctttgagtgtgctgaagctcttgtgtccactttttcaaaaagacagcatttttttcttttgccaagaaagggccaacgagcatcccggctgataaagaaataccgtcataagccgcatccctgtctcccgcttctgccaccagcacctcatagcactttccgtcctcttcaaggattacctcatctatcagcgcatatctttctttataaagccactccctgatatgaacagcatgaatattcggctgtaaaatgagccgttccttccccgttaatttgtctttgcccgcttctaaaatatgagcgatcaaagatccgcccattccggcaatcgtaatggcatcagcttcaccttttttaatcacttccagtccgtctccctgccttacagaaatgtgcgagtttaagcctgatttttcaacctgccgctttgcagacaaaaatgggccgtctgttatttctccggcaatcgccccgctggctttatgattcagcaccgcaaaacaaggaaggtaggcgtggtcagagccgatatcggccatcaccgctccattcggtatgtactccgctactgtttgcaatcgtttagataattttaattcgttcacttgtcatcacaacttttctcaatcattttttcctttactatcatataaaaaatcagcccggaatccaagctgaagcaaatgattttgaaattatttcttttgatgggggtctgcacgcggcagtcaaaaataaaaggctgtcgagaacatctcggcggcctgtgaatgtataaagagaaaaatggttcttttatttaatttttgacacccactctgccatatcatccagcttatcggccggtacaagaccggaaggcattccattaccgcctttttcgatctttgttttaatttcagcgacatctttcttatcccctacaccttttaagctaggacccgaaacaccttcataattttcaccgtggcatgcgatgcagtttgccttgtaaatttcttctggtgaagcgtttgcatctttcttttcagcagatttgctttctcctccgcttgcaatctcccgagagtcatcaagtccttttactgataaaaagaaagttagaccaattcctaaaacagcgatcagcaaaaatggaataagcgggttccatttcatttcccttccccctttttgatccttccccctatgtaaacacttctaattctaacttatttttacaaaaagtaaatggattgctatacaaaagttttttattcacactttatacaaaattgaattgaaacatgcctaaatctctaatatcctttttattctattgtataatgtattgtatacgcttacaatagaaaatatggaattagattttgaaatttttcaccacaatgttcatttgcaaatgacatcatttttcagtaaaataaaggcatattatccatatatctttttaaaaaaaagaagaacggatcttcaagacccgttccatcttattcaaggaaatctttcaaacgtttacttctgctaggatgtcttagtttccgcaacgctttggcttcgatttgtcgaatacgctctctcgttactccaaatactttgccgacctcttctaatgttcttgtacggccgtcatcaagaccgaatcgaagacgcaatacattttcttcacgatcagttaacgtatcaagcacatcttccagctgctctttcaatagctcgtatgcggcgtggtcagaaggtgaagttgcttcttggtcttcaatgaaatcaccaaggtgcgagtcatcctcttcaccgatcggtgtttccagagataccggctcttgagcaatctttaagatttcgcgtactttttcaggcgttaaatccatatcttccgcaatttcttcaggtgttggttctctgcctaagtcttgcagtaattgacgctgcacacggattaatttattaatggtttcaaccatatgaacgggaatccggatcgttctcgcctgatcggcaatggcgcgtgtaatcgcctgtctgatccaccacgtagcatacgtactgaatttataacctttgcgataatcaaatttttcaacggctttcatcaggcccatgtttccttcctggatcagatcaaggaacagcataccgcgtccgacataccgttttgcgatactgacaacaagccgcaggttcgcttcagccaatctgcgtttagattcttcgtcaccttcttcaatcttttgagcgtaggcgatttcttcttttgcagaaagaaggttaacccgaccgatttcctttaaatacatacgaactgggtcattgattttaacgccaggcggtacacttaggtcattaaggtcaaattcttcttcggctttggcaagctgctgaatattaggatcttctgtttcttcattctcactaattaattcaacaccttgttcacctaaaaattcataatactcatccatttggtctgattcaatttcaaagctggacatacgctcagcaatttcttcatatgtcaaaacgccacgttttttaccagactctgttaattgctcttttacttggtcgaatgttaattctgtctcgtgggtttgtttatcagccattatggatccctccttccaaagcttgcaacgaattctataagcggtatgattcttattcggtccattcaggcgttttctatgtgaactgcctttaacaatgtgcgaataatgaaatgacaattcatgatgaggttaagcgatctatttgctcctccgcaaggaatcattgccaataaatgctcctcatcagttctccagttattttaaagatcggttcaatgtaacgatttcttgagccagagaagcagctcttaaaaaatctttttgcctttcggcttcggctctttccgcctctttttcttttatcattgaccaatttctttgattcaacactttttttacataatctgataactcggcttcgctaagctcttgattaacctgaagcattaatatatcggacaagagctggcttatatgatcatccgtcaccctggccatcagatgctgaggcgtcagctcggctccctcttcataaaaagcataaagataagcggctaatgcccggtgctcatcaatattaaattgaaaccctacccggtcaatcacttttttgatgacgctccgatctcgaagcatgtgagcgagtaacagcctttctgcattttcatacgccggacgcaaacgtttttgccttgcttttgtcgtcagatgcgctcgccgcgtttttgtttcaccgctattgtcagcaggtttgttttgcttgctgaaaacagacagctgctcagttaaagactcctgtgaaagcgaaaactctgaagcaagctgctttacatagacttcctgctctagagaccctgaaagcgtgctgatttctttcagtacgtctttaatgtaagctaggcggtcgccttcatcggacaggttctttccttttcggaaatattgcattttgaacgccattacggtgacacttgcgtcaataatgtcgtttttaaatttttccccgccgaattttttgatgtaatcatcagggtccaatccgtcaggaatcattgcaactctgactttgcagccttttttttgcagaagctccgaagcttttaaggtggcttcataaccggctttatcagagtcatagcaaagaatgatttcttcgacgtttcttctcaggatcttgacatgatcatctgtaagagacgttcccatcgtggctatgctttcctttacacccgagcttacggccgatatgacatcagcaaacccttcaaataagactgctctttcctgctttctgatatgaaggcgggccttataaaaattgtaaagcagtttgcttttatgaaagagcggggtttcaggactgttcatatacttaggctgctggctgccaagagccctgcctgagaaagcaacaacagccccgtgatgatcatggatcggaaacatgacacggtttctgaagcggtcgaaatatccgcttccgtcttcgcgtctgatcaggagacccgctttttccatttgcgcctcactaaatcccctctttacaaggaatttcgtgataaagtcccaagaatcaagagcatagccaatctgaaattcattaatcagctctttcgtaaagcccctagaaagcagataatccagtgcctcttgaccttcttttgtatttattaacaaatgatggtaaaatttcttcaggagctcatgtgcctcagccattttttgttctccagaagactctggccgggctccggaatggactgttatatcatctggaaaatcaatttggtatttgtcagcaaggtgagaaaccgactcggcaaaagaatagccttccatctgccttaaaaaagagaaaacattgccgcccgctccgcagccaaagcaatgaaaaatctgtttgtcgggcgatacggaaaacgaaggtgtgctttctccatgaaaaggacagagtccaaagtagtttcggccttgcttctttaattgaacataatcacctatgacttcaacgatatctgccgacttttgcacctgatccacaatttcatctggtatccgatttcccatcttataacactccgtcgtacattattcgatgctttagtgcaaaatcccttcatcgttcgacaggattttttgcagcagtgtaataaatcgttctcgatcttctttattcaattttttaggccctttggcatatacgccttttcttctttgtttgccggaaaaatgacggccctctagggcaaaatcaatcgtgtcttccttgtaaagacgacctctttccgacataacagagacatttctgttcaacagcagagatgctaatccgatgtcctgcgtcacaacaatatctcccggtttcacgtgatttgcgatatataaatcagcagcttctttatgaggatcaacatacttccatttttcttcattgcttctggaaagctgataatgttcaaatgaagcgacaaaaagaacttgaacttcatactcggatgctgtttgtaaaatttcatcttttaccggacaagcatcagcatcgacaaaaatcgtcttttcttgttcattaagaagagtaattctccatccctccattaaactcctgcataaaagcaagcaaaatcgcacatcctttattattgtggatgtatatgaatttgtcgaaaaatttccgggagaaattcttgacatcttacccataatagtttattcgtatcacacgatccttaaacctaaaattaatcattttatcacaattttttattataatacaaacttcacaaagatgctattgtttttcattattcccttttggcacagccaaaaacccaggatagagcgtcctgagttatatgttttttgttttgagatgatggataatatttgctgtttcctcaaccgctttatttgaaacatcaacaacctggcagccgatccgatccacaatcttttcgaaatactcgagttcctctttgattctgttgatatttgcataaatcgctttatcattaagcccgagtgattttaaacgttcttttctgatatgattcagtttatcagggctaatctttaaaccgatgcattttttcggatcaacgttaaagagttcttccggcggatcaacctccggtacaatcggaacattggcaaccttcaggcgtttgtgtgcgagatattgagacagcggtgttttagacgttcttgacacgccgatcaaaacgatatcagcttttaaaatccctcttggatcacgtccatcatcgtatttaactgcaaactcgatggcctccacttttttgaaataatcttcatcaagctggcgcacccgccccggttcgtatttcgctgttaaaccgtaggctgtttccattttatcaatcaacgggccgataatatcataatataaaacatttgctttttccgcttcggctatcaaatattctctgatttccggcaccacgagtgtaaaacagataatgccgcagtctgcctttgcaagtgaaatcacttcattgatagtgcctatatcttcaacataaggaattcttcttacatgagtatcatccgccgatccgttaaattggctgagtgctgcttttactaccaattcagccgtttcaccgacggaatccgatacaacatagatgatgcggttattcatattatccccccgttagtttgcaatcttataggatttcattttcagataaactgacaagtattttggtcatatttgtttttgtcactctgccgatcacttcaaagcctttatcggtgtctttgatgacaggcagtgcatcaatttgtttttctattaagtgctttgcaatgtccatcacataatcctcgcgtctgcacaccgtaatgttcggcatccttgtcatgatgatgtgaacagggaccgatgtaagctcctgctggccaatgctcgctctgagcaagtcttttcgtgaaagcaccccgactaaaacagcatcgcggtccaccacaaacagagtacctacatcttctaaaaacatggtgcaaatcgcatcgtacacagaaacgttttcgtgaatcactacggggatagattgaaagtctttcacctgaagctttttgagtttatccgccaaaagctgtgtgccggtttttcccgtatagaaataaccgactctcgggcgcgcctcgaggaatcctgacatggtgagtatggctaaatccgggcgcaatgtcgccctggttaggttcagcttttctgcaatatgctcccctgtaatcggcccgttttcttttacaatctgcaaaatatgttcttgccgtttatttagttcgatcgtactcaccaccttttcacttcatagctatgtaaagaaataataatccatattataacgtaaatatcttgtaatcaaacaaaaaacttataaatggggaaaagacgattaccgatcacacagcaaccgccttttctctctttattttacaataagggcattcatattcgcaaaggacttgatctcatccgccaagcttaccatttgcgctaaacgatttgcctttaatgactcattatccgctataaccattgtatgatcgaagtaagcatcgatcggttcttttaaggctgcaagtgaagcaagcgccgcctcataatcttttttgctgaagttttcctgcagattttgcttcgctgtttggtaggcatcaaacagttttgcttcgtattcattttcaaacagatcaggctgaatgtctccgcggactccttttttgctgatagagatcactcggcctaacgcttcggctgtttccttaaagccaggtgcaccaagcttttgctccagtacttgtgctttatgcagcgcagagtacggctcaagctcagagctttccagcacggcgtcaatgacatcatgtctgatttgttcagcattcaagacatatttcaagcgctgagtgaagaaatccagcagttcattttctttatcggtttgaacgaaagtaagcagctcttcaaatgaaattccccagttgcggtcaagaagaatcgcaacaataccgcttgcttggcggcgcagtccgtaagggtcctgggaaccggtcggaattacgccgatagagaagaatgaagcgattgtgtcaagcttatccgccattgctacaacagctccggtgaaagtagaaggcgtttctccgcccgctgatctaggcatataatgttcattaactgccgcagccacagcttcatcttcgccaagcattctcgcatacttttcgcccataattccttgaagttcagggaattcatatatcatatgcgtcacaaggtcgaatttagaaatttcagcagcccgcttcacatgttttaatgtatcttcatcagcctgaagacgaacggcaagtttctctgcgattgatgtgactctcctaaccttatcagcaagagaaccaagctcttcatggaaaacgatattttcaagtttcttcacatttgcatcaatgtttagtttctgatcttccttgtagaagaatgaagcatcagataaacgtgcgcgcagcactttttcattgcctcgggccacattttcaatcgcgtggctgttgccgtttcggactgtgataaagtgaggcagcaggtcaccgtttttgtctttgacagggaagtagcgctgatgctctttcattgttgtgacaagcacttcttcaggaattgacagaaactcggattcaaatgaaccgtaaagagctgtcgggtattctactaaatgattcacttcatcaagaaggtcttcgtcaactggaatgctccaattgttttcagcagccattgtttccagctgagattgaatcatttgctttcggacgctaggatcagcaataacatgctgttctttcagctgctcttcataagctgaaggtgattcaattgacgcttcatgtccgaggaaacggtgtccctgtgttgtccgtccagactcaacgtttgtgatcgaaaatggaatgacatcctgtccaaataatgcgacaatccatttgatcggtcggatataacgcaaatcttcatttccccagcgcatgtttttcgggaaatgcaagcttgtaattaaaccgctcaattctggcagaagcgacttcgtttcttggccggcttggaatttttgcacgaatacatactctatgccttttacttctttgatgtacaggtcttccacatttgcgccttggccttttgaaaagccgattgccgcttttgtccagttcccgtccgcatcaagggcaatttttttcgcaggcccttttgcttcttcttttatatcatcctgcttttctgcgacatccttaacgaacacagcaagacgtctcggtgtattgaagagtttcacttcaccgtgagtaatatttttttctttaagccagcctgtcagcttgtcgccaagctgaaccatgctttcattcaaaaagcgcgccggcatttcctctaatccgatctctaaaagtaaatcctgtttactcatgagaagaaccctcccctttaagcattgggaaccctagtttttctcgttcctcatagtaggtttttgctacttttctagctaaattccgcactcttgcgatatagcccgtccgctcggtaacagagatcgcacctttggcatcaagcaggttgaaagtgtgcgagcatttcagcacatagtcatatgctggatgaacaagtccgttgtccatttgcttgatcgcttctttttcatatgtgctgaacaattggaacagcatatcgacgtctgatgtttcaaacgtataaacagaatgctcatattcagccatcatgaataaatcttttactgtaaaccctgacgtccattccaagtcaaacacgttttctttatcctggatataagacgcgagacgctcaattccatacgtaatctctacagaaacaggtttacactctaatcccccgacctgctggaaatacgtaaattgtgttatttccattccgtcaagccaaacttcccagcctagacccgcgcagcctaaagacggattctcccagttgtcttcaacaaagcgaatatcgtgctcaagcggatcaattccaagagcacgcaaggaatccaaatacagctcttgaatgttatcaggtgacggtttaataatgacctggaactgatgatgctgatacagtctgttcgggttctccccgtagcggccgtctgccggacgtctggaaggctctacataagccactttccacggctcaggaccgatactgcgcaaaaatgtatacgggctcatcgtgccggctcctttttctacatcgtaagcctgcataagcacacagccctgactggaccaatgcttttgcaaggttagaatcatgtcttgaatattcatttcaagcacctccacttttctttcataagttgactgcgacagcaaccaaaaaactcccgtctctatgcttgccagccgcaaacatagggacgagagttctcccgcggttccaccctagttgctgagaacaaaatcccagcctcttttttaaaattgctcaagaatgcctttcgttgcgtgctcatccttagcttccaccgccctaaggtcgctttcatgaggtaaacgcaagtacttctttctctcactgcaacatattttataataaatgatcatataaaaagatggaccaaaagtcaacttttgttttcacccataagatgtttcatgctttccatttgatctaaaaagcgctttgattttaaatacaatcccgaatattcttcgtaatataaatcaatcacttgctttaattcagcttttgtttcctcttttaaggacacattgccgagcctcgacagatcaaaatagtaaaagagtcttaacagccttgccgtttgcggtttgatcggtatcctgtaaggatctttttcaaaacagcggtggcatataaaaccattatcacgaacagagaaatgaaaggttccgtcttggcttttacaatgtacacaatgatttagctcaggatacaggcccatgacaccgagcatcttcatttgaacaatgaaggtgataacatccggatctgttccttcattcagctgttttaatgactctaatatgaattcaaataaataaggatttggctttttttcttctgtgcctctgtcgactaactcagcaatataggcagcatatgctgttaaaaacaagtcttccctgatgcctctcatgctgaggatcatttccccctgctgaagcgttccgaggcccgatgttttttgcattaagaaagaaccatacaaaaagggctggctgactgctgataaacggctgttcggttttttggcgcctcgtgccataacacctatttttccgtgttctcttgtcagtaaagttacgattttattcgtctctccgtaatcatttgtgcgaagaacgattccttcacattttgtcagcatttccgcaccttcctcaagcaggagcggccaagaggtttataaaattggataatcaaatcgggctagctcatcttctagttcttcgggtctttccatgttctctttttccagttctttaaaaagaagatacgtatcaacatttcctgtttgagaaaatacgttccaggtaaaattcaacacaagaaacccacctttctgtagttaaactagcttacctaaactccaaattcttacctttatcttgaccagatgtcctccatttcatgttaaacaaaatttgctaatgtatccctgttcctgtgagataatgacacacacagctagagattaatattcgtcctctttaaagccaaaatcgcgaagctgggacattttattacgccagtctttctgcactttcacccacaattcaaggtagacacgggagcccaacagtgcttcaatatccgctctcgctctttttccaacctcttttagaaggcttccttttttaccgatcacgatgcctttctgggaatcccgctcgaccacaatcgttgccgctacgtgcacagaaccgttgtcctgccctttgatggattcgatggccaccgcaatgctgtgcgggatttcttctctcgtcaaatgcagcaccttttccctgattaattcagaaatgataaatcgctcagggtggtcagttacctggtcactcggatagaattgcggcccttccggcaaatacgcttcaatctgagcgagcaaggtttcgatgttatttccttctaaagcagaaatcggaacaatttccttaaaaggataacgtttgcggtattcgtcaattagcagaagcaattggtcgggatgaattttatcgattttgtttacgattaagaatacaggcgtagacatcgtctgcaatttctcaatgatgaattcgtcgcccttcccgtagccttcctcagcattgatcataaacaagatcaaatcgacttcttttaatgtattttgcgccactttcatcataaagtccccaagtttatgcttaggtttatgaatccctggtgtgtcaataaaaatggtttgtgatgtgcctgtcgtcagtactccttgcaccttgtttctcgtcgtttggggcttatcgctcatgatcgcgattttttgtccaatgactctgttcaaaaatgtagattttcctacgtttggtcttccaataatggatacaaatcctgatttaaagctttcgttcgtcatgtaaatcctccgatgaaaatgcgcctggcaataattcttccacagtcatttcttttatttgtccttgtaaattagtcagtacgacaataacgtcttttgtgcaaagctcagaaatcacctgtcggcaggctccgcacggagatactggtccaggggtgtcagccgcaacggccagcatctgaaactctgtatccccttcagaaacagctttaaataaagcggtacgctcggcgcaattgcacatgctgtatgccgcgttctcaatattgcagcctctgtacacttttccatccttggtaagaagagcggctcctacttggaatttggaatacggcgcatatgccatatcacgcgcttttaaagcttctgttattaattcttgtctgttcatgtgtacattcctctcttacctataatggtaccgctatcactttatattttacataatcgcgcgctttttttcacgcccatttctaaaaatgtaaaataaatgtaagaattttcagccattacagctttggcaaaaaaataagtaaaccaatgatacacgaaatcacggcaaaaacgcaaacagccccggcggcagcgtccttggccgctttagcaagagggtgatgtttgtcagttattaaatcaaccgtatgttcaatggctgtatttaaaagttcaagcgaaaacataccgcctatcaaaaggaatataatcatccactcaatcatgctgagctctacaaggaagccgcaaatgagaacagcgcaggcggctgcggcatgaaattggaaattccgctccgtccgcgctgtttcccatatgccccggcctgcatgcacgaagcttttgaagaatcgattcagctcatttctatgatcttttgagtccataagcgtccagcaattccttttgcttagtaaacatctcctcttcttcctctttcgtcatatggtcatatcctaaaaggtgcagaaatccgtgtacagctagaaatccgagctctcttttaaaagaatgattatactcctctgcctgctctcttgtgcgatcggcactgatgataatatcacctaaaaccggaggcatttcggcgcccacgatttcgatctcgccttccccctcttcttcaagagcaaatgagatgacatctgtcggagcatcctttccccggtattctttgttaatctgatgtatgtcatcattggaaacaatcgtgacagaaacttcagcctgatcctgaacgccttcacgctcagcggcaaattgaagcagattttctacttctttgagcatctcttctgagacgcttcccgtttcatcaacgatatcaatcagtaaactcatctatttcaccttcttagtagcctccggatattcaatccgggagtggaaaattccttttaatgttgcacagagcgtttttgcgattgtatccagctctttaaatgtcaaatcgcattcactgaactgtccgtcctgaagcttatcggatataataccccggacaagcttttcaattcgttcaggatttggattatgcatggatctgacggccgcttcaacactgtcggccactgatataattgcggcttcctttgactgcggcttcggccccggataacggaactcttcctctgtaatctggtcgcctttttccttcgctttatagtaaaaaaactttaaaagcgaggttccatgatgctgctcagcaatatcgacaagctctttcggaaatttatagcttctcagcatattcgcaccgtctgtcgtatgcgagataataatatttttactcaactgaggtgacagcttgtcatgcggattgtcaatattcatttggttttcaataaaatattgcgggcgctttgtttttccgagatcgtgataatatgcgccgactcttgcaagcaaaccattagccccaaccgcttcacaggctgcctctgataaattggcaaccattacactgtgatgatatgtacctggtgtttctgtcagtattttgcgcaatagcggatggttaggattagacagctcgagcagcctcatggtggataaaatgccaaagcccgtctcaaaaaacggcatcaggccgatgatcaatacagatgaagcaaaccccgacacaacccccatgagcattaacgtgccgatttcaagacccgacagcgcagtgttctggatcaataataaggatagaacgacaaccatattaataaacgccacgaaaagtccggtctgcaaaatctttgatcttgcattgtgttttcctaaaaataatacacctgaaatgccgctgatcaaataataaatccctatgacataattgaatgttcctgtcacaccctgattaaacatcatacttccgcaaatcgcaagaatgatacttcccaaaatggcaatgcgttcattcatcagcagtttgattaagatggcgcctgccgcaatggggaccagatagccgatattattatactccatcttctgaaacaaactgacaacctccatgatcacaagcaaaagtgttgtgataatcgagaataacagaatggattggtttttaaacttcagattttgtttctgtttttcaaaataatatacaagtgttgcaatgaaaagtccgatcataatcaatagcccgctgatcggtttaaagagatttgagttatttaataacccagtcagctcaagtttcctgtacacttcccgatcaatgaggtcattttcttccacgagcacttgcccctgtttgatttggacctgctggacattatctgaggcttcctgccgttttgcctctgttgctttcggatcgaaaacgtaattcggaataatagcaaaacgcccgatttctgtcgcagctcccaagtatttagacggaatagaattgctctttagctctttttctaccttatcctttgcatcagatagtttatccgaggggatttcactgctcatgaccgtatttactgcggtaatgaccgtatctctgacaaaagaaaagtcttcactgtctgctttcagcaatgtcttgatggaatcctccgatatagaatcattcacatctgatgtcaatttgtcctttacagatttgaccattgatttttccgatggtgatttactgccttcctccgatgattttttcacttcactaatactgtcgaatattgatgacacaaggtcaatccgattgtctgtatattctttttttaatgtatattgatcttcaaccgcgtcctcagcggcttgctttttttcctctgtggctttttgatcttctacggttgccggagcgtaaatggtcttgtcgctgactgaaaacaggtctaaatcaagtgtttccggcttaacatgtacaaagagcaaagcaaacataatggcagccagcagaagatacagcagtacatgcatggagcgggcatttttaaaactgctccattttttcgagctgcttttggtcttagccttctttttcaacacaagaacctcctcttgaaacatcaagcccataagcaatcataaaaatgacccgataacgcgcgatcgggtcattcagcattaattttgcttatcgtatgcttcaataattttcgcaacaagcggatgtctgaccacgtctgtctggtctagctcaatcatagaaatgccgtctattcctttcagcatctccttcgctactgcaagtcccgatttgacgcctttcggcagatcaatttggctgacgtcacctgtaatgatcattttagagccaaaacccagtctcgtcaaaaacattttcatttgagcaggcgtggtattttgtgcttcatcaagtataacataagcatcatcgagcgtccgccccctcatatatgcgagcggagcaatttcaatgatgcctctttccatcagacgttctgtatgatctgccccaagcacatcatggagagcgtcatacagcgggcgcaaataaggatctactttttcttttaggtcacctgggagaaaaccaaggctttcaccggcttccacggcaggtcttgttaaaatgatttttttgatatgtccgttttttaaagcatggactgcttttacgacagccaggtacgttttcccggttcccgccggaccaatgccgaatacaaggtcattccgcttcatagcggccacgtattcccgctgtcccattgtttttacacggattgatttgccttttgcgttttttgtaatttcttcttcatacatgctttcaaagtattcaagttcattcttctttgccattttgatggcgtaaatcacatcacgttcagagatctctatccccttgcgaattaaagcgaggagcgatcccagcagcctgtctgcaatctgaaacgattcatcatcgcctgacacataaatcgtctcgccgcgcgtaatgatatttacattcagatctttctccatcaatttcaaaaaagaatcttggttcccgaagagtgaaagcgcctcgtccgggtttttcagtttttgattcatcgcaagtaaatgttctgtcattcttcagtctccctgacaataggtgtggtttgaacgatatcttctataacttggtagagaataatcaactttactttaccattctcaacagtctggtgcaaaactttttcacttttcacctcgccgttttcgcctattttatcctctacatcctgtttacccaatttaatgccttcttgaactgcttcttctttcgtatattttcgcaaagcctcttcactttctctcgtttgctctttgacataggatacagggagcttaaatccgagaaaatgaagcgaatgcttttcttgttctgtttttggatgcttcaattcctcttttttaaacgtcatcccccagatcgggattgccaaagaaccaaaagaaagcttgtgctttgtccttactttgcccgtatagacgttaaataatgtttcaagcgggactgtcacttctgatctataccaggtttctccgtaaatttctgcttttgaggcgacttcctgctgatggtcttcgctgccgatcagtcccgaaacaagcagctgtcccttttcaacatgatcgtgtatggcggccatgggctgtcctttttgcacaaacattctcgtaatggttgctttctttttggcgacaatattgcgcgggctaacatatttttctttttcgggctcatttttctccacaactttcatatgaatggtcgtccccttcagatcaactccgacccaagtgatattgtctattccattggttaatgatttctgtattttttcgggcgacatcattaaaaactgcagacggccctttttgacgccgatttcattaagatgctgcctcatttgatgttctgtttcaggcttagcgcctgtcacatcaattttccacaccatattggacagcaaaaacaaaagaatgaaaaaaatcgcaaaaccgatcgtaaaccctatattcagctttgatttcagcaacaggaagggaaatcccttccgattgataaatcgggctttacatttaaatttacttcttacccgccgaaaggcatgtacatcctgaagctgtatatataacgatacggcttctttcttttttttgacatgaaagaccggaatcccctgtcttgtgcattcattaaggagccgctcaatccctcttcccgtcaattcaagctggaccttacccgaaaaaaaagacagccatttatttttcacaacatttccccctcggctttatgactcaacatatcgaacgacatcaatcgtaccctccaaaagtatctcttccggaagaatcgccttgatgacaaaatttttaccagatatgatgcactggccctgcttcagcatcagccgcacttcattctcactgaaaagcaaaaggcctctgtggttttctatgtagatatgaagtctgccaaccattgtaatcctcggcagatccatcataacgtccgggggaatttccaatgctcttgtcagccaagctttcatacgattctttctttgccccatacaaaaagaaccccctttcatctcatatgtatgatttgaaaggaggttctaacactttaatttttacgggccgggcgcatcgtacggtgaggttttttcgcccgtggaggtccgaacacctctcctagaacgatcccctgtacgacggtgtctttattcacctgaagcattttttgttttgtgtatactgttttttgtttggcagcagcaagatctcgttccagccctttcaggtttcttgctgtttccctgcgtctttcttccgcttcccgtcttgcctgttccatacggttagggataggtgcaggggcatcttcttttgactgcttcttttgaggagaagcagattgcatgtgttgaggttttttacttttttggctgttttgcttttcttctttgctctttttgccgaaaatcgcagaaatgattccgatgatcgctgcaataataagcggattggtcagtaaatcttccatcagcgttctcccttcttagagagattatgatttgcggtcttcatccgaagggtctttcgtcagcttgccgaatgaatcacgcatttctgtgtcagcatcgatgttcttgatattcatgtaatccatgacgccaatattcccttcacgcaaagcttctgccatcgcaagcggcacttccgcctcggcttctaccactttcgcgcgcatttcttctacgcgggcacgcatttcctgttcttgagcgacagccatcgcacgtcgttcttccgcttttgcctgcgcgatgtttttatcagcctcggcctgatcggtttgtaaaattgccccgatgtttttgccgatatctacatctgcaatatcaattgagagaatttcaaacgcagttcctgagtccaatccttttccaaggactgtctgagaaatcatgtcagggttttcaagcacttttttatgattatcagatgaaccgattgtagaaacgatcccctcacctacacgagctacaatggtttcttcccctgctcccccaacgaggcgctcgatattcgctcttactgtgattctcgctttcgctttcacttcaatcccgtccattgcaacaccggcaatgaacggtgtttcaatcaccttaggattaacgctcatttgaacagcttccaacacgtcccggcctgcaagatcaatggcagcacagcgctcgaatgtgagttcaatgttagctcgctgagcggcgataagcgcgttgacgactctgtcaacattacctccagccaggtagtggctttcaagctggtttgttccaacattaagtcccgctttatgggctttaatcagcgggttaacaacccgattcggaatgacacggcgaagcctcatcccaactagagtgaaaatgctgattttcactccggctgccaaagctgaaatccaaagcattacaggcacaaatgtaaaaaatactgccaaaacaatgatcgctactgcgacaattgccagaatcataagtgttgacggatccatataacttctcctcgtttctatttaaatttctctcacgacaatgcgtgagccttctactttaatcacttttacttttttatctttttctgtaaacgatccctccgaaacaacgtcaaggcgttcatcatcaataatcacggtaccggaaggacgcagcggtgtaaaggttatacccacttttcccattaagtccgtgcgcgtttgatttgaaacgtagccgctctccgtgtttgtagaatcatttaatatcaatttcttaaagaatttcatacgctttcccaacacccttgtcagtaaaataaaagctgtaatcgaaacagctgaggcgatcaagagagaaaccgccatgacagtgaagctccccgcggctaaaaacaggctcgcaataatcgctcccaaacccagtaatccaatgattcctccgggaagaaaaatctcaagcagaatgagaatcacccctgctataaagaggagaaccgtctcatacccggcaaggccggctgcaagatgcccgtaaaagaacagcaataacgcaatgagtccagccgttccagggaggccgacacccggggaaaaaagctctaccgtcagacctaaaaaagcgattgtcagcagaatagggacaatgaccggattcgtcagccatcttgctgtcttttctgcaaagctctcctttgcatagctgatctgcgccttttcgaacccaagcttctttacgagcgtggacaaattgtcagcagtgccttctgaatagcctacctcaatcgccttgtctgcgttaagtgtcagcagatctcccttaggcgcgccaacttccttggcatctatatctgggtcagccattgcgagcgcatattttggatcgcggttatttttcactgcggcatcttccatctctgccagccaaagtgattgagctttttggtcagcggcattgccttggccatcaacaatcgcggaggctcccatttttccgccaggcgccatataaatgtgatctgcttgaagtgcaatatatgcaccagcagacaacgcgcgtttgttgacatatgcagttacggggatctcactttcggttatcaaatcggccatatcaatagcagatttgaccaatccccccggggtattgatatcaagaataatatggtctgcatgtgcatcctttgcgtcttgtaacgaacgggacaaaaacgaggcgagaccctgttcgacatttttttcaaccgggatcacataaacagtttgtttttctgcttttgcgttcagctgtacgcctaataaagaaagtaaaaatatacccaaaagagcagcacggaatcctttgatttgaagcaagggcggtgtatccctccttccttttataataagtgccttctcttcatacgtaacaaatgtatcaaaggtttcatttttttatgtataaaaaaagacatctctcttagaaagatgtccttttctttgccatttaagacagttgactgctcacaagcttattaattaaacttccgtcagctttaccttttactttaggcataattgcccccatcactttgcctatgtccgcttttgagctcgcaccgacctccgcgatggtttcatttacgattgtacgcagctcttcttctgacagctgctcaggtaaataaacttctaaaatgtccagctctttttgaactttatctactaaatctaaacgattagcgtttgaaaattcctggagggagtctttacgttgcttaagttcacgagaaaggacagtgagttcctcatcctcggtcaaactgtctttcttaagcttaattgcttcattttgaagtgaagccttaaccattcgaacgacagtcagtttgtctttctcacggtttttcatatacagcttcatatcctggttgagacgctcaagaagactcataaatccaccctcttttagaatttgcgttttctagcagcttcagactttttcttgcgctttacgctaggtttttcataaaattcacgctttcttgcttcttgcaaagtacctgtctttgatacactgcgtttgaagcgacgaagagcatcttcaagcgattcgttttttctaacgaccgtttttgacattctctttccctccctccgaatacaccaatcgactacctttaagttacacatataaacatgtactttgacattataatataagccatcagtcaggtcaactaagtgagttcacttttccgtcatgagtgcgactgcctgtctatataatgaaagaaaggggttggtgaataggatgttaattctgattagctttactgctcttatattattctttctcgcaggcatgaacatgcttcgaaaaggcttaatttctatggcgtactcaaaaattgaagaacgtttgcttttatttacggaccatccgttaaaagcgtttcttatcagcattgtatttacgggaatacttcagagcagttcagcttttatggtcattgtcatcggctttgtaagtgcgggcgttctttcttttaagcggacgataccaatgattctggggacgaatgttggctctacttttacaactgaatttattgctatcaaaatggatattttgatctgggttcttttaataggaggtttattgttttttctgactggcaggtatcctttgaaacagctgggaacaagcttccttggactgggcatcatcttcttttgcatcagcggattcagccatcttgccgggccgctgacaaagctgaaaacgggagccgacgttctataccatgttaacgattcaaactggtccgctttgctcatcgggatggtgttaactgccatcattcactccagttctgtctgtatcggcattttgatgagttttatgaatgaagggattatcggactgacacaggcgatgagcgtcgtactcggatcaaatatcgggacatgcattacagctgtcatggctgctgtatccgggggatatgcggcgaaacagacagcgtatgcgcatgtggtatttaacgtgctaggggtggctctagtattgccttttctgaccgcagcgaccggctttgtagagcagttatcacccgatcctgcccaaaggattgctcatttcagccttttatttaatgtggtgacagctcttttgtttcttccgcttacaaacttgttttaccgcttgattcactttcttatcccggctaaataaaaaaccggtacattttaatgcaccgattttttaggttaagaagacaaacgcatatgttcagttatttcatcctcaaccacacggacaaactgtccttcgttgtaaggataacctgcttttaggattttgacttttacgattttgccgatcatatcttccgtgcctttgaaaacaaccttcatataattgtctgtgtaaccgacaaacatgttctcttcttctgtttctttataggcttcctcaggaataatctcaagcacttcattttcatactgagaagcgtattcttttgcaagctggtcagaaagagcaatcaggcggtgcacacgttcgtttttcacgttttcatccacttggtcttccattcgcgcagctggtgttcctgtacgtttactgtaagggaaaacatgtagctcagagaatttatgttctttaataaagttataggtttccataaattcttcttctgtttctccagggaacccgacgatgacatcagaagtaacagctaagcctggcagtgcttttttcaatttatttaaacggtctgcaaagaattccattgtatacttgcgtctcatccgtttaagcactgtgtttgatccggattggataggaatatgcaaatgattcactatcttatctgagcggtctaagacctcgatcacttcgtcagtgatttggctggcttcgattgaagaaattctgatccgtttcacgccttccacacgggtgtctaattcgctcaaaagcttagcgaagttgtaatctttcatatcttcgccgtagccgcctgtatgaatacccgtaagaacaatttccttatatccggcatcaacaagctgctgcgcttgtttaatgacctcttcaggatcgcgggagcggagcaggcctctcgcccacggaatgatacagaatgtgcagaaattattgcagccctcctgtattttcaatgacgctcttgtgcggtccgtgaaagcaggcacatcaagctcttcatatactcttgctttcatgatgttgctgacgccattaatcggctggcgttcttctcggtattggtcaatgtagccaagcattttttcacggtcctgtgttccgactacaatgtcgacaccggggatcgccataatctcagcaggtgaggtttgcgcgtagcagcctgtgacacagatgacaccgtcaggattttgacgaatggcgcgtctgatcacttggcggctttttttatctcccgtatttgtaaccgtacatgtattaatgacatatacatcagctgtttgttcaaagtctcttctttcatagcccgcttctttgaaaagctgccagattgcttctgtttcataatggttgactttacagccaagcgtatggaaagcaacagttgccattactgatcacctcttaataactctgtttgataagaaatcgcgctcaacgcgtatagcggagcggtttctgtccttaaaattctcggtccaaggccgcacggcacaccgtcttgctctgtgagccgttcaacctccgcttctgttaaaccgccttcgggaccaaatacgatcaatagagatgatcccttcggaaggctgcttacaatcgcgctgaatgcgcttatttccccttgcttcgatgactcctcgtatgcaacgacacatttatcgaaatcctgcatcctttgaagaagctgctgaaaagaatggacatccatcactcgcggcacttcgttacggtacgattgctcagccgcttcctttgcaattttcgtccatctttcccgctttttctttgcctttttgtcatccagcttgacaacagaacgcgcggcttggaaaggaataaaggcatgagctccgagctcagtccccttttggataatccattcaagcttatctcctttcggaaggccgctcgcaatatagacctttatcggaagctctctgttttcattcgtccattctatcacaaggcaggacactttatctttggaaacagattgaagttcacattttgcctcgaagccgtcttgagagcagcagataatctgatctccctcattcattctcatcacgttcacaatatgatgaacatcttcgccggtaatcgaaaaagccggcgcttcctctatttgctgcttcgtgagctcgataaaatatcgttgcatacgctgtgacacctactaactgttattttttcgcaataatgctgacccaatcttccattgaaaggatttctacaatggtaaagccagcttgttccagtgcttcttttacttcttgttttttatgaccgatgattcctgacgtaataaagtggccgccttcttttaagaggctgtacgcttgtgaagtaaagcgaagaatgacttcagccaaaatgttggccacaatcacatcatgttccccttcaatcccgtctaacaaattgttttgcttcacttgagcaatatcgctgactttgttcagcttgagattaaggcgtgcactttctacagccacgggatcaagatcgtaggcatgaaccgattcagcctcaagcattgcagccgcaatacttaaaattcccgaaccagtgccgacatcaatcaccttatcacccttttgcacaaagcgttcaagcgcctgaatgcagagtacggttgtcggatgtgtccctgtgccgaaagccattcccgggtccatttcaataatcagttcatcagtatggaccggcgtatattcctcccacgtcggcacaattgtaaacttttcagaaattttcacaggatgataatactttttccaggcagtcgcccactcttcttcatttacttcagaaatagtgatgtggtttctgcccaaatcaatattgtaaagaaggagattattaatcgtttctttgatgccgtctacagtttcgcccagaaaactgttaaccggcagatatgctttgacaatgacaccctcatctgggtaatcattggggtcgagctggtagatttccccgtacacattctcacgttctttaattaaatcaagcgggtcctctatcacaaccccacttgcaccagcttcatgcaatatatttgagataggttcgaccgcttcatgtgttgtgtgaatgcttaattcggaccatttcaaaactaccaactcctcatccaataattaatcgcctttaaacgcccgttttaccttgtcaaagaaactcatttcctgttcgtcaggcaggtttccgctgacttcggcaaattcgcggataatgtctttttgtttatctgtcagatttgtcggcgtaacgacgcggacgacgatatgctggtcaccctgtccatagcctctgacattttgaacgcctttgcctcttaatctaaatttcgttcctgtttgtgtaccggccggaattttcaatttcacttttccatgcagcgtcggcacttctacctcatctccaagagcagcctgagcaaacgttaacggcatttcacagtaaatatcatcgccgtcacgctcgaagaactcgtgtgcgcgtacatggaacacgacaaataaatccccagcagggccgccgtttattcctggttcaccctgtcccgagagacgaagctgctgcccgtcatctacaccggctggaattgtcacattgattttcttgcgttttttgatttttcctttgccgccgcagtccgcacatttgtttttaatgattttgcctgtaccttcacagtggtggcagacccgtctgttaacgacttttccaaacggtgtattttgctccacgtttaactggccggagcctccgcagtgggagcatgtttctggatttgttccaggtttcgcacctgagcctttacatgtttcgcacgtttcctcgcggggaatttcgatggttgtttctttaccgaaagccgcatcctcaaacgacagggtcatcgtatactgtaaatcagcaccctggcgcggagcgtttggatctctccgtcttgtgcctccgccgaaaatacttgagaaaatatcatcgaaaccaaaaccgccgaaatcgccgccgccaaaacctccgccgccgaagccttggttagggtcagtgtgaccaaattgatcgtaatgcgcacgtttttggtcatctgacagcgtttcgtacgcttcttttacctctttaaatttttcatctgatccggcttctttgttaatatcaggatgatatttttttgacagcttccgataagcttttttaatttcatcctttgaagcgctcttacttactcccagcacttcatagtaatcacgcttactcatctcgcttcactctcccgaatttctcacataaattagattgtatcattttgaattatgatttttcaattccttttatcccgggcaagaaaaaaagtcaaagccaagagatgcctgactttgactttctaatcattgaatcagattatgaaatgtgttcttttcggtcagctccggaagcggggctgacactaaaaagaacttattttttgttttggtcgtcgtttacttcttcgtattcagcgtcgacaacgttgtcatccgctttgccttcagcgtttgctccgccttgagcttgctgtgctttagcagcttcttcataaagcttcatagaaagctcttgaacgattgtttgaagctcatcctttttcgctttgatctcttcaaattcgtttttctcaatcgctgcttttaaagcatctttggcatcgttggcttttttcacttgttcttcgtccactttgccttcaagatcttttaatgttttctcagtttggaaaacaagctgatctgcttcgttgcggacttcgatttcttcttttttcttcgcatcagcgtcagcattttcttccgcttcttttaccatgcgttcgatctcttcatcagagagacctgaagaagatttgattgtaatgttttgttcttttcctgtgcctaagtcttttgctcttacgtttacgataccgtttttgtcaatatcgaaagaaacttcgatttgaggcacgccgcgcggtgctggcgggatatcagtaagctggaagcggccgagtgttttgttgtcggcagacattgggcgctcaccttgaagaacatggatatcaacagctgtttggttatcagcagcagttgagaacacttgagatttgcttgtcgggatcgtcgtgttgcggtcgatcagttttgtaaacacaccgcccattgtttcgataccgagagaaagcggtgtaacgtcaagaagaacaacatcttttacgtcacctgtgataacgccgccctgaatcgcagcaccaagcgctacaacttcatccgggtttacgcctttatgcgcttcttttccagtttcttttttgattgcttcttgtacggcagggatacgagttgatccgccgacaaggatgactttgtcgatttcgcttgcagaaagtcctgcatcttgaagcgcttgacggacaggacccattgtgcgctctactaaatgagaagaaagctcttcgaatttagcgcgagttaatgtaagttcaaggtgaagcggtcctgcttctccagctgtgataaacggtaaagaaatttgcgtagaagatacgccggaaagatcttttttcgctttttcagctgcgtctttcaaacgctgaagcgccattttgtcttttgacaaatcaatgccgttttcttttttgaattcagacacaagatgatcgatgataacttggtcaaaatcgtccccacccagacggttgtcgccggcagttgaacgaacttcgaatacaccgtcgccaagctcaaggatggaaacgtcgaatgtaccgccgccaaggtcgtatactaggatcgtttgatcttcatctgttttatcaagtccgtatgcaagcgctgctgcagtcggctcgttgatgatacgttctacttcaagacctgcaattttaccagcgtcttttgttgcttgacgctcagcatcgttaaagtatgcaggaactgtgataactgcttttgatactgtttcgccaagatagctttcagcgtatgatttaaggtgttgaaggatgatagcagacacttcttgtggagtgtaatcctttccttcaatttcaactttataatcagtacccatatgacgtttgatagacataattgtgttagggtttgtaatagattggcgtttagccacttcccctacttgacgttcgccgtttttaaatgcaacaactgatggcgttgtgcggtttccttcagcgttagcaataactttaggctcgccgccttcaagcactgccacacatgagtttgttgttcctaagtcgattccgataactttactcacttgaataacctcctgctatgtaattattgattcactttgaccatggaagggcgaatgacgcgatccttcagcttatagcctttttgcatttcctcaacaacaatgttggagccgtagttttcgtcttcagcctgcataacagcttggtgcagattaggatcaaattcctgccctacagcttcgatggcttcgacgccttcttttttcaaggcttctacgagctgacggtggaccatttccattccctggagcaaacttttcgtctgttcattgtcggcttcaacctgaagcgctcgttcaaagctgtcaagagccggcagtaaatcagtcacgatattttgagaacggtatttttgggacgcttccatctctaaacggctgcgtcgtttatagttttcaaagtctgcttgaacacgcaaaagtttgttttctttttcctcaagcaaaccttgcaattcgttaatttggttttgaagaagttcgctttcatttgtttcttcctgctgttcatcagcggcagcttgttcttcaatgatttcttgctcttctgtttcgttttgttcaacggtttgtttttcttctgacattgtgttcacctccctcaaagtgtaaggagaaggacaggtgctgcccttcgataaaatttgccaaaattcccttattcatcatacagacttgttaatgcttttgacaagtccgaagtcacatgctgaagcaggctgacaaccctggaataattcatgcgggtcgggccgatgatcgcaattgagccgatctgcttctggtctacggaataagaagccgttatcagactgcaattttccatctcttcatagtcgttttcttttccgattttaatcgaaattcccgtgtgcggggattgaaccagctttaaaacatcctgttctttctcaattaatgaaaggagcgaccgaactctggtgatatcatggaactcaggctggttcagcatattgattttcccgccaaaaaacaacttttcaacgtgatttgtggaatgaaatgttgaacgaagcgcgtcgagtatattgtcatagtttttaatgtgctgtcttaggtacatgacaacttccttaaatatgcgctcattcagttcatccattggaacgccgcttaaacggtcgttcagtatatttaccagtttttcaatatcagacagatccattttggtcggaaagttaatcgttttgttttccacatgccccgtattggtaacgagaatcgctaccgccatatcaggctgaatcggaatgatttgaatctgtttaaggtaattctcactcaacttcggcccgagtacgatggatgtgtaattcgtcagatcggacaaaatttgcgctgatttttgaactgtcttctccagctcgaaaattttctctttgaagatcgagtggatttggtccaggtcgcttttcgtcaatttgacgggtgacagcaaatggtcaacatagtaccgataccctttttctgacggaacacgtcctgaggatgaatgggttttttcaataaagcccaattcctccaagtcagccatctcgtttcttattgttgcagagctaaatgtgatttcatcttttttcgaaagagttcttgatcccaccggctgtgccgatttaataaaatcgttgattataacctgaaggatcagcagctgacgatttgttaacatcatcatcacctctgttagcactctcaataagcgagtgctaattctataacaaaagtatcaaaccacaagaaaaatgtcaattataactcacccaaaaaagcgccaaaaacttcattgcctaataatttcccttgatgagtcaaataaacggcagactccgaattgtgaatcagccctttttcagcgaggtcttttaacacgcttgggaaaagtccatccagggaacggccgtatttttctgcgaatcgttttttgctgacaccggctgtttttctcaaacctaaaaacatttcttcctcaatctgttcttctgttgttacttcatgtgtatctctgtacggaaaacccttttcagctatcaggtcaatgtaatgcttaacaggtccgacgttcactgttcgtgtgccgccgatatatccgtgagcgccggctccgaaaccgaaatattgttcgttgctccaatacgttagattatgcttagattccatgcctgccttagcaaagttgctgatttcatattgatgaatgccgtgagcttccatctggctcatcaccatttcatacatttcagcttcctgctcctgcggcggaagatgaagccgccctttttgcatcaaattataaaataccgttttcggttctacaataagggagtaaacggaataatgctcggcatccagtgataaagcagtgtttatggaatgttccagatgcttgagggtttgccccggaagcccgaacatgagatcaagactgatattctcaaaaccgatttcccgcgctctttcaaaagaggtgaatacatctttttgcttgtgcactcggccgattttttctaacagatcgtcttcgaacgtttgcacaccaaagctgaggcgatttacgcctgcttcttttaatatttttaatttctctgcggacaagtcgtccggattcgcttcaaccgcaaattccgataagtcgcttgagggctttagcacgcggttgatcatatctatcagctttttaagctgttcctcagacagggaggtcggcgtgcctcctccgataaagattgttttaagatcaggctgcccggtttttgctattgtatttatcatttcctgttcgagtgcgtttaaatactcgtcgactggctgactttgaataaaatatttattgaaatcgcagtagtggcaaatatgctcacaaaatgggatatggatataagctgatttcaacggattcaccttctttacagaaagaagccgcagtacaagactgcggcggcttctattgttttttcggactgtcgtccattttcagaactgccataaatgcttcttgcggcacttcaactgagccgacctgcttcatacggcgttttccttctttttgtttttcaagaagtttccgtttacgcgagatgtcccctccgtaacatttagccaatacgtttttacgcattgcttttatggtggagcgggccacgattttctggccgattgcggcttgtaccggaacttcaaactgctggcgcggaatgagttctttcagtttttcaacgatcacttttccccgttcatatgcgtaatcacgatgcacgataaaggaaagggcatcgattttttcaccattcagcataatgtccattttcacaagcttggacggtttgtagccgatcagttcataatcaaaggacgcatagcctttagtgcttgatttcagctgatcaaaaaactcatatacgatttccgctaatggcatatcataaatgatgctgacacggtttgcgtctaaatactgcatatcaatgaaattgccgcgttttccttggcaaagctccattacagcgccgacatagtcattcggcaccatcatcgtcgcttttacgtatggctcctcaaccctttcgatcttttgaggatccggcatgttggacgggttgtcgacaacgaccttttcgccgtctgtcatatacacgtcatagataacgcttggcgctgtcgtaatcaggtcgatgttgaactcacgctcaattctctcctgaatgatctccatgtgaagcatgcctaaaaatccgcagcggaacccgaatccaagcgcttgcgaagtttccgcttcatattgaagggaggaatcattcagctcaagcttttcaagagcttcccttaaatcattatacttcgctgtatcaatcggatacaaaccacagtacaccatcgggtttagcttgcggtatcccggcagcgcttcttctgcaggattggcagcgctcgttattgtatcaccgacacgtgtgtcaccaacatttttgattgaggcagtcaggaagcctacatcaccgaccgtcagttcatttgtcggagttgctttcggcgtgaacacgcccacctctgttacttcgaattctttgccggttgccatcattttgattttttgtcccggctttaccgttccttcaacgactctgatataagccacgacaccgcggtaggcgtcataaagcgagtcgaagatcagcgctttgagcggcgcctccggatctccggtcggagctggcaccttttctacgatttgttctaaaatctcctcaataccgataccggcttttgctgaagcaagcacggcttctgatgcgtcaaggccgataacgtcttctacctcttggcgcacacgttcgggctcggcgctcggaaggtcgattttattgatgaccggaaggatttcaagatcgttgtcaagcgctaagtagacattggcgagcgtctgcgcttcaatcccctgggctgcatccacgacaagaatcgctccctcgcaggcagcaaggcttcgggatacttcatacgtgaagtcgacgtgtcccggcgtatcgattagatgaaagatatattcttctccgtcttttgctttatatttaagctgaacagagtttaatttaatggttatgccccgctcacgttcaagatccatagaatcgagcaattgttctttcatttctcgttgagtgattgccgacgttttttctaaaatacgatccgctaaggtcgattttccgtggtcaatatgggcaatgatagagaaattccgtattctcgattgcctctctaaacgcttttctttatctgtcacaatctatcactcctactattaaacgcaaaatacactagcttagattatatcaataggattgtaaagattcaatgtaaaacaagaaagagaaaagttccctatcatatctgggttgcttttctctttcacgtacttattgattcatatcccgtatccattcatacattgactgggcagtattggttacggtgtccgaaagcgcttttccggcttttgaaaacatattgaatgtctccaccttttccagctctttttgtttttcttctaaatcttttgccgtgactgtttctcctaggattgaggcttctttttcattatcttttccgtcggtgagcgtaaacgcccccttcagtgaagggtcatgatagcctttcatactcagcatcccgtggtttgcctgctgcatgccgaacagaacgcctaaaaacatgatcgtgacaagcagtaagcactttccaaagtatgcaatcaaatcaaccacctatttcttattgttttttcgtctccccgctcgctgcgttgaccttttcagcatcccagtacatttcgctgaatacgtccgcggccgcgttagccgcacgctgcagctcttcgagattattatccactccgccaaactcgagcaaaagcgctctatcggttaaatcctgattgtaaacaccattatcgcctggcgagcctttggaaaagacacctgtgctaagtccggggtattttttctccatcagtttatgaagctcactcgcaattttatagttttcttcgaagtttttgctttttttcccgacgacaaaggctaccctggcatagcttttccctttaatcgttgcggttgtgtcttttttgcgccgagagtctctgtggatgtcaatgatatattgcagatttttgtttgaagcgagggcgtctttcacgaccggccttgattcatcataggacctggcatagtttaagccttttttattcaattttgactgtatatcggttttattcactgtggctccgattccctgggattcaagcgcttgtccgaacatatctcctacaagcgtgacattggctttagaatggcgcgccatgtcaggatcggtctcgccttttaatagagggagatatgattccgtattgtgcgtgtgatagataaacacgacctttttatcacctgttgtttgtttcggcggatctttttgcgcattatctgattgcgtttgctgtttttcaatctctgccaaattcgcttctctttcttcctccatcaccttagacggcggcggcgattccgcaggcatattcgtataatccgttccttgtccagctaacaaaatctcggtatcaaattgtgcaaatcctggcagctcccgaccgagaaagctccgcggatcttcgaggttaatgctcgtcgccagctttaaagaaagacgagaaagatgaaatgagctgtctgtttgagagaggtcagaagcgaaataatggttttccatctgcagcaaatgtgcaaatacgtcacccggcaattcttcagcaatcccataaaaagagtcagacgacggcctaagttccggccggagagacgtcagcacaccggatagaacaaaaatcacgataaggcttacgataaatagaaagatggcttttaccgctttccctccatttaccgcaacaacaatctgtctgtttctgcgtttatttctcattgaatccctccagcgcttgtctagtaattactctatgaacaagctagaggaagtagaactgtttagtgattgtaggagcctttgttttcttgtgacactttttcatgaagcgctgtgtttaatccgttcgctaaaacatttgccatatcgtcgataaatgaatcgacttccttcggtgtaaccattaagttgtgccctaaaggcgaaagcacctcgtgaatgagctgccgtttttcatcttcttgaagggttccgacaatacctaggaacgattggcgctgcttttgatcgggaagatcgtcttcagtgagcactttctttttcccaaacgtcatgcctgccggaacaagcgatcttgatggcctgttatccttcatttctctgccaaaatgttttaatatgtagtccaccgtgtcgctggcaattgtcacggcatcaactactgtcggaacaccgatagcaatcaccggaacaccaagcgtgtctttgcttaaatcttttcgtttattccccactccagaccccgggtgaatgcctgtatccgatatttgaatggttgtgttgaccctttccaccgcccgcgccgccaacgcatcaatggcgatgacaaaatcaggcttcgattgctcaatcacacctttaataatgtcacttgtttcgattcctgttatccccattacacccggtgcaaaagcactgacaggcctgtaaccctcctgtacgttttccggctgaagcttaaacaagtgccttgttaccaacagattttctactgccatcggtccaagcgcatcaggtgtcacgttccagttgccgagcccaacgatcaaacagctcgcatcttttgagatattaaggttttcaagaaaagctgagaattcctccgcaaagacagcagagaccttctcttgcatttccgaatcattctccctgattccctgtgcttcaagcgttaaatagcgcccttctttttttcccgaaagctctgcgccttcctttgtaacatcaactgtgcggattttaatgccgccgtgatcacgctctttttcaataaagcctttaatttcttttgtcggcacagcctgctgattggccattgcttccttcgtttccactgccaaatcggtccgtatcaaatactgattcacatccagctcactctttttcatacaggggcctccttcacattaagtacctatattgttgccatttgctgaataaatcatgctaaaaagagaaccttcaatgaaaaatactttacatttatattgcaatctaaaggtgtgtttgatagaatacaatttgttctattgtgaagaagatttaaccttaagacactgtgctacaggttgtatcttaggaggtgaaacacatgccaaacattaaatcagcgattaaacgtacaaaaacaaacaacgaacgccgcgttcataacgcgacaatcaaatctgctatgcgtactgcaatcaaacaagttgaagcttctgttgccaacaacgaagttgacaaagcgaaaactgctcttactgaagcagctaaacgtattgataaagcagtgaaaacaggtcttgtacacaaaaataccgcagctcgatacaaatcaagactagcgaaaaaagtgaacggactttctgcataatataaaaacgatcctcaataatggggatcgtttttttcatttctttttaacagctgtaaaaggaacagttcgagcaggagctgcttgtcctttttcccggttttcatctcatagtccatgacggcaagctgttcaataattaaacggagctcctcctctgaaaaaagccttgcttgatccatcgccagctttacccgaaatgggtgaacttttagattagaagcgatttgtttttgtccgtatccctgttccgcgaagtacttcgtctgcagaatcagccggaactgattcgaaataagcgccataattttgatcggttcttcattttgttttagcaaatcataaaaaatttgcagactctctgttcgttttcggttgacgattttattgatcagctcaaaaatattttgttcaaggcttctagcaacaagcatttttacatcatccagcgtaatttcttcacgatctccaataaacgtgcagagcttttgaatctcctgaaaaatcgatgacagatgaccgttcacaagcagaaccaaatgctccgccgcttccgtgccgattgttttctgctctgtttttgcaaggttgacagtaaagtctgtcgtttcctttgcatttaattccttcgcctccatcataaacgcgtgcttctttaacgctttcgtcagcttttttcgctcatcaagcttttcatacggagcaagcaggacaaagactgtgtaaggcgcaggtgattgtatatatgattcaagcgcactgacgttgtgctcaattttttcttttttcttttcacctgttaaaaaatatggatttttcacaatgacaagacgccgctcccccataaacggaaacgtttcagcatctgcaatcgcttgatccagcgggtcctcttccagatcaaaaacggatagattgaaatcctttgtctcctgatcaacgaccgtctgtctgatcctgctgacggtttcttgcagcagatatgtctcttttccgtataaacaataaactggatggacatctccttttttcaggcttttccacacatcaaataccattgttgtacgacttcctctctttcatcatccccttctatcctaaattgagtttgcaaaatagtaaagaggaagcctgactgctgcttccccatttatattaaacgcctgttcgcaagcccccgggacagcttgtaaaaaggcgataatcaccagaacagaaaacgttaccttagcttctagatttttcaaaacaattccattatacttaagtcagtcaggagggataaagttgaatgattttgaaaaaaacgttcaaagcaaacgaaatgatgctgtagattcagctgttggttttgttgtgtccttcggatttttcgccttcttgtttgtcatggcaacggttattcacctagttggttcataacagcgactgcccgggctgctgatttctcggcagtcttttttagttcgtctctgttatatctgatgtatcatatggaggatagacagaaaaggttccaactctgtttttgtatctatattggatcgttccgttttgatctgttcgcagcacgcggatagaatgtctctgtaatagttgcagaacttcttgatgaggatgatggtaccgattgtttttcccggctgagataatggccgttttcggctgaagctgttggatgaattcttcaccggtagagcctttgctcccatggtgccccacctttaagacatctgctttaatatttggaaacacgtccatcacctcctgttccccttctttctccaggtcacccgtcaagatccagctcataccgcccgtctccatccacagaacgagagaggaattatttttgcttgccggatcaggtgctccaggtgacagtacatggaactgcaaatcctttatttgcaatacatctcctcgcttcacctcttcaattgtcactccctcttctctggctgtctgcagcactttctcatctttaggttcagaaacgaaccctttcggaatcacgaggcgctttactttatgatgcttcagcagagtctccgcctctccgatatgatcttggtcagcgtgcgtcagaattaaagcgtcaagctgtttgattcccttagcagttaaaaacggaatcagcaccttttcccccagtgaaaacggatgctgtttttcgcgccaaggctctgacgagtaagacaaagtgccgccggtatcaattaagacacgcccccgctgatgcggagcacctacaaacatgctgtcaccctgtccaatatctatcatatccacttctccttcggaactaagacacggatatataaagagcagaaacagcaccgtgcagcaaatgcctccggttaccatcaactgcgacaaggagcgtttttcaatcgccataagcaataggatgatcgtgaccgtgaataaaaaaagcaaaacaggtgcaggatgtgcgatcataatcgtgaacacatcaacatctgcaatgtttgtgattagcctattggtccagcttatcaataaatcaaaccagctgaaaaacaatctcccaaacgaagcggaaagacttaatagaagaacacctgctacagctcccggcaaaatacagaaggtataaaatggtaccatcaacatattcatcggtacgctgatgatagaaaactgatgaaaatgatatagaagaatcggaagcgagcccagctgagcgatgagtgatacaattgtcagctgtcccaaggaggttttaacctgctgaaaaatagaagaggatagaattaaagaaaaactgacggcgaacgatagctgaaaaccggcttcaaagagatgataaggattgaagagcagaaggacgatgtatgaaaggcaaattgcagttgcagagtggacacgccatttgacaaggcttccagctaagtaaacacccgacatgagagcggcgcgtagcactgaaggagcagcgccggtcaacatcacatagagcggcagaaataacagcaacagaattgacgccttttctctagttataccaaggcgaatcatgatataaaacaaacctgctgtcaaaatccccacgtggagtcctgatattgccaagagatggacaacaccaagcttttgatacgcggtaagcacttcatcctccacataaaatctgtcaccaactgtaagtgcctgtacaatccctgctgaatcaggaggcaaaaggctgtttgtgaatgatatgatatgttttctcaagctgagcaccttgtacttaaaattttcaggttcgctgcagttttggatagacgtgacagagtagttccaatgaatatgctgccgataaagatactcgttataatcaaatgcacccggcacagttgcgtgattcggttcttccaatgtaccagtcaactcacatgacattcctggttctatgtataacagctgttctttttcaccagcagactgaatgcgatacgcagcagcccatttttccttatcaggtgtctcaaccatcatagacatacggtcgccgtcaattttgggaatagtgtcaatcactgccttgaattgataggttccctgccgataggaagagacattctgagaatctgtgactgcatacagtacaaaaaacaatataaaagagaagaaacaaacaataatgagaaaagcgtgcctcgttttgattaaaatgatgaggagaaagaggatgaaaagaaaaatagcggggaaataagcggcggcagtaattccaaccgttgccgaagctgccgccataggcaataacaaacgcgaattacgcattcatcacacgtagctcgtgaaaagtgtattcgcctgttcatgtatctttttcaattcttcctccgctaaaccggcatcggccaatttccctattagacccgctacaaatgaaagcttttccctgtttttcagatcaacgatcatttcatcgagttcaacctgttcaactgttacacccgcctgttcaaataattcctgcgcatacggatgtgttttgtaatcctcagcataataaaccgttttgataccagcttgaataatagatttgcagcattgaatgcacggataatgcgtcacataaatctcggctccatcagtcggcaccccaaacttagagcattgaagaatcgcattcatttcagcgtgaatcgttcttgcgcaatgatcatctatcattaagcatccttcatctgcacaatgtacaccgcccgcgattgacccgttgtagcctcctgctatcatgcgtttgtctctgactatagtagcgccgacagataatctcggacatgtgctgcgcagcgccaataaatggctttgagccataaaatattgattccatgaaattcgttccacgttgttccctccaaatgttgtgttgcctgacctttagtttacctatcataatgcatgaccgtcaaatcactttactgtaatggaagactttattttctcaaatgacttttcacctattcctgaaaccttagtgatatcttcaattgtttggaaacgcccgttttcttcccggtatgcaataatagcttcagctttggatggccccacccctgagatgccttgtaactcctctaaggttgctgtattgatattcaccagcggccccttccctccatcgctttggacagaccctccggtaccttgctgcactgctgtttcctctccctttttcgggatgtacaccactgtcccgtcctgaagaacctcggccaaatttacttgcgcttcgtctgcttgtttactggtcccgcctgctttctcaattgcctgagatactctgtcccctgttcgcatttcataaacgccaggatgctgaacagcacctttgatgtctatcacaattgtttcgcttgactcgtcgttgtttgcttcctgctttaccactgtattttctgtctctgttggtacagcttgcttcaccggctctttatttttccctgtggccagaaagatcataatagctgtgaaaacagccgcagaagccgctaaaataattgttttcttatgctgattcaaccaattcatcgtgcatgttccccgctttcgtcatattttattttcataacacatatggtttagaggataatagctcaaaggaggggaaaccattgaagataggctttatcggcacaggaaatatgggtacgatccttatcgaatcatttattgaatcaaaagcggccgatccctcaaacataacaatcacaaaccgcacaattgaaaaagcgttgcacataaaaaaccgctacaacagcatcaacgttaccgaaagtctcgaaaagctcgtttctgagaacgagatgatttttatttgtgttaagccgcttgatatatatcctttactggcaagagcgttaccttatttaagaaaagatcatattctcatttcaattacaagccccgttcaaaccgaacagctcgaacaatatgtgccgtgtcaagtggcgcgagtgatcccaagtattacgaacagagcgctggcaggtgtttctctcgtcactttcggcacaagctgcgacgaatctgcaaaaacgaaaatcaatgagctaatgcagcatatctctcatccgctgcaaattgaaagtgacatcacaagggttgcatcagacatcgtaagctgcggccccgcttttatgagctatctgattcagcggtttatagatgcagctgtcacggaaacatcagtatctaaacaggacgcgattttgatgtgtaaggaaatgcttgtcggaatgggaaaactgttagaaaccgaattgtataccttgcctgcattacaggaaaaggtttgcgttaaaggcggtgtaacaggagaaggcattaaagcgctggaaagcggtgtgcagaatatgtttcaccgggtatttcaaaatactcatatgaagtacgaggaggatatttccgcagtgaaaaagcagtttcatgtgtagacgagtatgtcatactttcgtctgtactgcaaaagcataaaaaagcattttaaaaaaccatcgttttaagaaacgatggtttttgatttctgcgccttgaaaaagaggcgttctgattgtgctgatggctcggtatccgtaaaatcagctgtcacgcgatggagctgaaagccgcagttcttaagcatttcttcgtattcttccaccgggaacgttctttgctcgtgtgtctcatcaaaacgatcatacgcttctccgttccacacaaaaaacgacatatcatgaatgacagaaagctcgtcacttccggcaaagctctgccaaatatagctgatatcttcgtcctggtcagcaaatgtgctatccggaaagacttccgcaattttataagatgaatgaacatcaaacagcaaaatgccttcaggctttaatacccgaaatacacttttaaaggtttcgatcacatcattttttgtttttaaataatttaatgagtcacagcatatcacaacagcgtcaaattgaccgtcaaagccggtaatctctctcatatcctgctgaagaaataaaataggctggctactcgataccttttgctgggcgaaagaaagcatctcttcgctgagatcgatgcctgtaacctcgaagcctttttcggcaagccggatggagatttcccccgtgccgcatgccagatcgagaatacggcctttttccgggagagatgcttcaatccattttgtccattgatcgtaaggcgcgtgtgacattaactcgtcatacacgcttgcaaagccctgataaatcattgattcattccaaagtcaagatctgcgagcggagcgtctccccacagcttttcaaggttgtagtagcttctttcatccttgtggaagacatggacaattacatcgcctagatcaacgagaacccatcttgcttcatcaaagccttccatctttttgacttgaatgccgttttcatcagcttgatccttgatttcacgggcaatagcctgtacctgtttatctgaatttccgtggcagatcagaaaataatcagcaaccagagaaataccttccatatccagtgctaaaatatcctctgcccgtttatcatcgcaagccgcagctgcgatctttaaaatggacttttggttcattcacaaattcctcctgttcagctgccagacacaagccagttatacgttaaaaatgtgtctggaaaaaccggttgattttttttcataagaaaaaccattgtatttttaatggactgaatcagcgcttgattcaaatctgtctcagcaagcttacgcacctcatcgacaccgggaaatgcccggtttggctcaatgtaatcggcaacgtaaatgactttttctaaaagtgtcatgccggggcgccctgaggtatgatacctaatggcgtcaagaatgtcttcatcttgaacccctgcctctctttggaccaaataagcgccgaccggagcgtgccagagctccggattatgatccaataaatgcgcaggcattttttcacgcgcaataatttgtttcatttcttctttcgggcggaatttggcgtaatcatgaaagattgccgctgtttccgcttttttagaatcggctccaaaacgctccgcaagttcgatcgccgtgttcatcacgccaaccgtatggatatatcggtgttcggtcaattgctgcttcacgcatgcaagtgcctcctcacgattcatataaaccattctcctctacatacttcttcactttatcagggattaagtagtcagtgggcttcttgcttttaaaccgttcccttatcatagttgatgatacctcaaattccggaacgtctgcaaagagaagcggataaggggtttcaacatgaaaaccggggcgctttactccaataaattgaatgaggttcagcagctcgtccagcttataccatttcggcaaatattcaatcatatcagcgccgataataaagaacagctgatcatttggataacgctgcttcagtaaagaaacggtatcaaaggtatatgatggcccttctctttccatttcaacaagctccagcttaaaggacggattagattgaattgcaagctttagcatttccacgcgatgaaagctgtcggtatagtcttcgttctgtttatgcggcggaatttgattaggcataaaccaaatttcatcaagccccgcctggtacagcacctcattcgccattaagaggtgaccattatgcggagggtcaaacgtgcctccgaaaattccgattttcttcatttcaaccacctttaaggaagctcgatttgtttattttcctttgattccttatataacacaatcgtattgccgattgtctgcaccaattgagagcggcttccttttacaagagcttccgctacatcgtttttatcctcttcgcaattctgaagcacgctgactttaatcagctctctcgcttcaagcgcctcagtaatttgtttaatcatgttgtcgtttactccgcctttacctacttgaaaaatcggcgttaaatgatgcgcttttgaacgcaaaaaacgtttttgtttacctgttaacattctgttcctcctaattttcctattacaatagatctcattttttcaatatcaggctcttgtccagtccacaattggaaagacaatgctgcctgttcaacaaacatgcccacaccatcgagtgttttcaagcctttttggcttgcttcttttaaaagggccgtctgtattggattatacacgatatcacatacgacggcactgctcgcggcacgctgtaatgaaagcggcacatcgtccacgttcggatacatgcccacagacgttgtatggatgataacatcatactgctcaagacgttcttctgcttcttttatgcttaatacttctttattgtgaaacgagggagtagcttctgtaagccgctttgctttttctaacgtccggttgcaaatgtcaaattttttcggggtatttcggacaattgttgtaaaaatggctctcgccgctccgccagcgccgatcattaagaatgacagttcagagatgggcttgtctaataccttcattaatgacttcacgaagccttccccatcggtattgtatccgacaagcttatctccctctcttctgaccgtgtttacggcaccgagcacttttgcactctcatcaatatgatccagataatccataatggaaaccttgtgcggaacagtcacattgattccttgtacgcctagagctcttattccttttaccgcatcctccagatcattctcttctaccttgaaggcatgataatgtccgtcaagcccgaggtctttcaatgatgcgttatgaatatcaggtgacatagaatggccaatcggatttccgataaccccgtacagctttttcatactcctctccccttttcttaaattaatgaacgccgaacaaatacatgaacgccttttggcgcgtatgcagttacctttttatcggcgtcatggacagtaacccagcctaacccagagaaaacgatatctgtctttttgtcttttatcgtaaacgtatgggcgaccaattccggaaactcatccatttcatctttacccggaggtgtgagcaattcccctgcatgcttttcataaagcgcgtctgcattttcaagttttgttctatgaatcatcagttcattcggcatatagcaaataaaaggagatctttccccagacacataatcaaaccttgcaagtccgccaaaatacagtgtttgctgatcattaagctggaatgtgcgaggcttcagctcctttttaggagataatattttcagatcctttttattgacataatgcgccatttgatggttgttgataattcccggtgtatcataaagcgatgaaccgtcatccagcgggatttcaatcgcatcaagggttgtgccaggaaattgggatgttgtaataatatcttcttcacctgacacttctttaataatccggttaataaaggttgactttcctacatttgtacatccgacaacatagacgtcttttccgttgcggtaatgctcaatcgcgtcaattacttctctgattccctggccgcgtcccgcactgaccaaaaatacgtcaaccggttttaagccaagctctttcgcttcacgcttcatccattggatcagacgctctcttttcagtgacttaggcaaaatatccgctttattgccaactaataagatagggtttccccccaccaagcgctgcagcccattaatccagctgccgttaaaatcaaaaatatcaacaatttttacgacaagagagtccgtttctccaataccgtgaagaatgttcaaaaaatcatcatcagttaaggagacatcttgtatttcattatagtttttcagtctgaagcaacgctggcaaatcacattttctttcgtaagcgatgcaggcggcgcgtaccccaaacctgttttgtcctcggtttggatcgtaactccgcacccgatacaaacaaccttttccatttcttactcctcccactgaatgtgcccttttcgtttgagagcactcagtattctgcgttcgacctggcggttaaagcgcgtaatgaatccgtcagaggaagcgactggcacgaccaaaatcgtatggtagccgtttcggtttcccccgagtacatcggtcagcagctggtctccgatgacaacgcagtcctcttttttcagctccatattgcgcaccgctctattaaaggctttacccatcggttttcttgctttatagatgaatgggattccaagcggttctgagaaaagtttcactcttctttcgttattattagagacaattgtcactttaatgccgtgttccttcatttcttcaaaccactcgatcaatcgcggcgtcgcgttcggcctgtcccattcaacaagcgtattatccaggtcagtaataatcccttttacatttcgttcctttaatttctcaggtgtaatatgaaaaatattttttacaaactcgtcaggtaaaaaaaacttttttaacaaaacccgcacccttccctttttctttctttcaaaatgattgtcgaaaaaaatcgaacttgcgcctaaagaaaaactgagcaaaaaaatttcgacaaaaattgggtttcttcaccaggtgtggataaatttacacacactatccactcttattacatcactctttagacaaattataaacacgatactcacaagttatccactttttggtgtggataacagaacgattgttcttatatgcatttcatggtagattaaagataacttcaacctcagatgaacgcaacttatcattgtatgcgttaaaatcatgaatgattccaacttttaaggaggtgcctctcccattaattgggttcctagcatgagaaaactgtctgatgaattactaatagaatcttatttcaaagccaccgaaatgaatttaaaccgtgactttatcgagttaattgaaaacgaaataaaaagaagatcgctcggacatattatttccgtatcttcttaataggaatttgtctattttttccgggcgtatttcctttttttactcagatgactgatattatatcactttggctgcgcgctttactactattttcagcaaaaaacacccctaaaaagaggtgttttaaagggccggttattatgctaaccagtatatgccgcccacaacaaggagaacaacaactaaaacaacaataaaagcgtatccatatgctctgcctgcgccatacatgtgaagcgcctccttaataaggttttataacagcctatgtaggagaaataaatcggactaggcggttgtccggctcaacgctgcaggatctgcccatcttgtattccttcatatacgatccttgcccctttaggtgtcatatgatttccagaaggatctataagaccagattggataagcgcttcatcagttgcttttccgccgtctgcttctataaaatgcttccagttatctacaagagggacatccaggcgcttcgacacatctcttgtaatatcgttatatgagttgtgccatttccttgctccgccttttggttcaaaagcagctgcttgatatctggaatagtaaaacaaatgatgcttcccattaccttctataattgggatacacgtcattaagattggcttgatcccgtgttttctgctttcttcaataaaataaaccagattttctctaaaacgctgcttcgacactctcggtttcccctcagtcagtatggcagcgtcattggtgccgaacataataaacaaatacttcggtttttgatccagcacatctgtctgaaatcggagacgggcatcctctgtcgtctgtccgccgattcccgcattgagtatatcaaggttaccgcgctcagctgtttttaatatattgacccactgctgtgcttttggataatcgcgataatcccaattagagccacgcgtattgctgtcaccaaatgctacaacgtcttcgtatccccttccctcgcatcctgctgtaacgaacagcagaaggaaaaggatgataaaatgtttcatctttacacccccaaaagcctcaccttaatgttatacctctgtttctcttcgttcaatgaagagtttttcgctatcactgttttttcctatagttaacgtgtccccctcagtgaatatcattctgctttcattgcggcgcagctgatgattttttaaaattcccttctttccaatctgaaaaacacacaaaccaaagaaaagaaaataacctaaatccgcactggaaacaggttatccgttaaatcctgcatttactttaacttcgatttaagcttggcctttgtttttggcccataaatcccgtctgcagttaatccgttcatgagctgaaaacgcttgacggcattcgctgttttcggtccgtaaactccatctatgccattgtttttggctcccttatcagggtaaaagtgaagtgcagttaaagccttttgcagctggagaatgtttgtgccctttcgataaggcgaagtgagctttataaccccagacggcagaggatatgatggtaaaggttcttttggaggtgtatccgaggaagaaattccgtttataaaagagttccagtggttcaagagtttccgcggacattctttcccagaccattttttgtggggaacaacacgatgtaacggaatattgttttccttcatcagctttctgatcagccactgggcatttgatgttgctttttcaaaatcgccatcagcattttcgcagatttcaatcccgatcgatttgcggtttcctgtcccgtttgtaccgtctcccgcatgccagccgttttcatctatcgggagatgctgataaatgactgaatcgtcaactgtaaaatgccagctttcggatgtgctcgggttttttacaaaattggcgtgcattttcgcatcagcgccttttgctgtattcgctgtattatgcaccgtaatataagcaggcgtcatcgcatagccaggacgattatcatttgataccggtataaaatccttttttatggttaccatttctatccctccctattattaagaatgcagaaaacagagagatggacagccttttttatgaggtaaaaaagaattgtgttctcaacctggttttcagttgaaccgctgaaatggcaccagttatactaatttagatgacggaggttttggctcctgacatcacctaagttgggagtgaccatagacatgttaaaaaaagtaataggtatacttgtgattatcgctatcattgcagtcggtttttttcagaaagaagcttggcttgatgcaatcaaagcaggagggatgttttccgttttatttagtatgctgctgattgctgccgatgtttttttcccaatagtgccgtttgctttggttgctgctttaaatggcgcagtgttcgggactgcaaatggaatttggattacactgaccggctcaatgcttggtacaatattgctgttttttctcgccaggtacagttttagagattgggccagaaaaaaagttcaggcctatcctgccatacaaagctacgaggcttccttcaacaaaaacgcttttaccgctgttttattaggaaggctgatacctgtcataccttcacttgtaatgaacgtgatctgcgggctgagccaggttcgctggcatgtttttttctttgcgtctttaatagggaaaatccccaatattgttgttgtcactattgcaggtgccaatttcaccagcaataaattattgtctatcagcatttacggtgcatatattctgatcatcatgctggtcatttataaaaagttccctcatcttctgaaggtgccaaaaaaataaggaggcttgttggcccccttactttttttctgtcgcatggcctccaaattcatttcgaagcgcagcgaccacctttcctgtaaacgtatcgtctgttaaagaacggtatctcatcatcagtgacatggcgatgaccggagttgccgtctgcagatcaagcgcggtttccaccgtccattttccttcacctgaggaatgcataatgcccttgatctgatccagtttcgcatccttagcgaaagctcgctcagtcagtcccataagccaagaacgaatgacagaaccatgattccacactctggcaaccttctcgtagtcaaaatcaaattggctgttttcaagcacttcgaatccttcaccaatcgcggccatcattccatactcaattccattatggatcatttttaaaaaatgtccgcttcccgcttcaccagcgtatagataaccattttcgacggcagtatcacgaaaaagcggttccacaatctcccatgcttcatgatcgcccccaccataaaacaggctccatgccgtgcgccttccattccgcccgacgttccggcatcgagataatggatacccgcttctttcatttgattgtagcggcgaattgattctttataatgagagtttccagcttcgataatcatatcgcctttacttaataaaggtgatacatcacgcaaaacagcatcgacaatgccatgcggtaccataacccataggatacgcggcgggtctaataaagaaattaactctttaagattcgttgtcccctcagccccgtatgctttcagttcatcaacagccgcttgatttacatcatatccaaccgcttgatgattgcggtcaatgaattgctttcctatgtttatgcccattttccctaagccgattaatccaattttcatatctgttcctcctgattgtctaaaaagcctttactctttatgttccctttggattgtattgtgatacgcagaaaacaaatggggcttacatcgtctgcgcatgtaaattttatttttcatgactgactgtgcctgccagttctattactgaatctctttatatccataattatcactttatccttgatttaccatcagtttaagttaaaatatgggaaggtattcgatttttttagtaaaaagaaggtgacatgttgcagaatcaatctcatactcttatcggagttacgaaaaccgctgtattctttttatacgctgcacttgcaatcatcggttttgcaatcgggtattttattccgcagattgcgaaatgggcattatccctcccctggatccctcttgaaggaccacttcggctcattacctcttttcagggatctacagcttcatttatcactgctcttctcggtatgtgtgcggggatttggttcgctcattctgttattgcaatgctgctgtctgtcaaaattacagatcacacagtggaattcatcaaaggaaaaaaagtgcaaacaattcattccgatgacatcgctcttgtatttatggatcacaaacggcttgtcctcctgggaacagccggatatgaattggtacgggaagaaattgatgaaaaaccagtaaacgttgagaaggcctttagacagcatcattacgaatgggcaacagatggtgatccgtttaaagatcaatttcgccgatggattcctgatgcaccagacctatcgcaaggcgcccatgccttattaaaagctcgtcacaaagcactgcaggacgaagaaaaagacgatattgaagaattccgtctcgaactggcacagctgggcatcgttgtacgggacgaaggcacacgccaatattggcgaaaagcagaaacctatcccccgaaaattcagctcggcgaaggattgtaacaacagaggctcaagaaagagcctcttctttattactgcacaataaacagcactctggtgccgtcagggtagctgctcatttgattccctacccacgagccggcgccgcgattatcagaaggcgtcacatatcggacatcagcccctgcaccgccttcctcgcagaccgccatcggccactcatcccggtcatagcccggcttggtcgggattccctttaaagattcctcccgccttttgtctgctccatctctgtcaatggtacaaatatctggatgtccctctgcaatcgcatccctaatatgactgccggtttccggataacgagacagcggaaaatataacactttgtcatacgaagatgcgccttggatctgttgcggaaccattaaacaaagaagaactgctgcagcaagaaacaggcctgccatccattttttcattcccatccccccatacctttgttcatttcaatgtatgggcgcttgatgaagaatatttttaacatttgaagttagtatgctgcttaccaaagccggactcccccgcgagaaatttcccggtacagacacagacagcctcccggtcacatacatttacatataggcttttgcctacatacttttgtggaggtgacgatggtgacaggtgttttcgcagcgctcggctttgttgttaaagagcttgtctttttagtatcttacgtgaaaaacaatgcctttccacaaccgctctcaagcagcgaagaaaaaaaatacttagagctcatggctaaaggggatgaacatgccagaaacatgctgattgagcataatcttcgcttggtcgcccatattgtgaaaaaatttgaaaatacaggtgaggatgcagaggacttaatctccatcggaacgatcgggctgataaaaggaattgaaagctattccgctggtaaagggacaaagctggcgacgtatgctgcgaggtgtattgaaaatgagattgtaattacaaaagggggtgcatactcctctttaatacgtttaaatatattcggtgatctcttctcctctcttggtttattattgaaacggaaacaaaaatccattacactattgctgatgcaccaacgggtgggaggactcgccatgaacaaaaaagaactgctcctaatgaatttcaaggacttgtttaacaagatggcttggcttaataagccaaagatggaagtctgtcttaaagggtataagccttctgaagtacattgtatagaatccattgaacatggaaatactaatgtgacaaaactagctgagtccctttatatgacgagggggccataagtaaaatgactaaaaagcttatagaaaaaggcttaattgaaagctaccagaagccagataacaagaaagaaattcattttaggcttaccgagcaagggaaaaaaatttataaaatccatgatgaactgcacaaagagtttctagagcgcgacaaggcagtatttgaacaagtaaccgaggaacaatttgactttatgattaactttgcggaaaagtataatagacatttggatgtagaaataaaaaaacaaggttttgatattaagtcggaataaatttaaataatgaaaatgcaaccacaggcagccaactctattgagtttcggctgcctttttattaccgtcattttgttgacgaggaaacaaaattatgttattttttgttgactgggaaacaaaaaatacaacttttgagaggtgaataatatgttaaaagacaaagtaaaggagccaggattaccaaaagaaatcctcatggcttcctgggccattgcacttggagcaattgccccaatgcttgactcaactatggtgaacattgccatcgacaaattaaataaggatttcagtacgacgttggataccattcaatggtccattacaggttatgttttagctcttgctattgcagttccagtatccggatggcttatgaacaaatttaatggaaagaaaatcttaatcggcgcagtcattgcctttggtgtaacttctgtttttgctggaattagttgggatgtttctagctttatcttattccgtttgcttcaaggatttagcgctgggattattactccgctcatgtcaacactcttggttaaaacagcaggtccagagaatataggaaaagttatggctatcgtcagcacacctatgattttgggcccaatcttaggacctgtaatcgggggcttcatcgttcaagctacatcatggcattggattttcttcatcaacgtgttcatcgttttgattgctgcaccactgatgatgaaaactcttccagactttgagccattcaacaaaaatagtaaacttgatatttttggaattatcaatctatccttaatgagtgcagcaatgatatacggaattacaaaagcagcagaccatgcatcatttaacaatagcgaaacaatcctatgggtgggcatcggcctctctttagctgtaatttacatcgtatataatcgaatcagaaaaaatcaaaccgtactccctttaaatttgtttgcacacaagaacttcttagcatccagcgtcgggttattattagcgaatattgccgtcatgggacccatgttaatacttccattgttctttcaaaacttccgtcatttcacggcaatcgaagctgcgcttgcattaatccctcaaggagttgggatgctcgttactcggccaatgattggaaaaatgattgataagatcggtgcaaaatacgtggttattgtcagtctcgtcctttcgcttatcggatctattccgcttatctttatcaccgataaaacaagtatgatttggatttctatcatattattcatccgcgggaccagttttggaggaattatgcttccgttaacaagtgatgcttatacaggacttgacagcaaacaacttccagaagcaggtgtcggtattaatattattgaaaacctcggtgcaagttttggttcagctgttatcgcaactgttgtcgcaactactatacaaggattgcaaccaacgattgcgaatggcttaaaaggttaccatgccggattcttagtatccaccattgtccttgcggtaatcttcatcccaagtctatttctcacacataaaaagaatgcacaataaagaaatctgcatactcgactgccgaacggtttgtttggataacttgtgatacatgtgatgtgcaccagtttcataagcccatttagaaaggcgcttactaatttgattggctatctgttttcttcgatgtctggatctacttcagaggtttcaattacaaaaagagggcaataaccctctttaatacgtttcaatatatatagtgtcagaatccacaacggtaacttctttcacgataaagttaacaattgtttttttatcatcaagggttaagttatctgcaccgattgattgaaaatagtcgatggctctttttagagcattttcacttgagctcgtatcatccaggactttcatttttgattgaatttcgctacacttttcagtaagctggttttgctttttttgcagctcaataatttgcgctttgatttcatctatgtctaaatcatcgtcatcgcttaggctgattagcgttaaaagacgcttgcggcctttttttgttttctctatctctttttgaataagttctaattcatcagacaggtgatttgattgttcaatctctttgaaagaagcatacttttgaggatttgtgatgaatttaaaaatttcaccccatacatgccggttcaatttattctcagacatttcctttccgcagccgcggtcctttgcgccagaataatttttccggcaagtatatacatagtagtctttaccatgtgattttcttttcttccctgtcatggtatttccgcatttcccgcatctaaccaaacccgataacaagtaattgtgagggctaatgcttaagtgttttcttttactttgacctaagagttcttgagcataatcccattgttcagctggaacaattgctggaattgccacagtgatttgctcctcttcaggccttattttgattatagatttgttccctgcctgttttgaaacataggaaccctctgtatcatatttatactgtttatgttcacccttataagaagagttcattaatatctgtcgaacaacctgcctgtgccatactttggcacctttttttgttttaacccccatctgagttaaatgtagagcaataccatttactctgccgaaaaaagggcttttatgatcggtgaaatagttaaaaatcatcctaatgatttttgcttcctcttcaaaaatctcaagagttcttttctctttaacaaatttatagccatatagtttggaatctttaataatcatgccttttttcattttttgaagtcggccgcttgatgtccgttctttgattttggctttttcaaattctgagattgctccacgcattgcgaaaaataattgaccttctggagaattggcgtattcaccatttacaaataccaagggtatatttcgctttcgcaattcgtcatcaatgataagctgattcattaatttccgagaaagacggtcaggatcataacaaatgacttgacttataagtcccttgcttgcatcctccctcaagcgattcaaagccggacgttctaaaagctccccagaaaatccttcatcggcatacttcagcacatccttagtccctgctttctttatacaggcctcgatctggctgtcgatgctcgatcccttgatcgcttgttcctcggtcgatacccttacatatattgctatcaccctggatctccttcctataaagttttattaaataatgatagcaatcgttaatgcatttgtcagcttgcggtccctcgatgattatcaccttcataaaatgcatcaccccttgggtaatgctatgtaaaggcggtttgtcctaatgaaatcattttcaatgagtgtgaaaaaagcacttaaaaaaccgatagttaaaacgatcggtttttcgacatcgcctaggccctcaacatagtaaattcatatcattagttatgaaagcttattttcactacactccttatatttaattgccatcatttctatacgatttatatgaaatatggtaaaaaatggttagctaaaacgataaagataccaacctgttcatttggtatccccattcttcaagtacctcaataaatgtaaaccactgaatatttttatgacattgcacgtgtcaatgatgccaattcatgaactcataaaggagatttaataaaactcccaaaacaaaagggatatcaatatagttggtatcttctttattagtttgaatccctcaataaagtggatgcttatcataattacaaaaaactttatttgaagcactgaagtcattcattatattgttgtaaagataacactatagtccccttcttacttcataaacggttgttatatttaacttcttaattaagggacattttctgtttttagattcgttatgtctttttctgttacgtaaagaatggagataaaccaatagaattaagtgagctttaaatgcttcaaaaagctctgataacaaatctctttataatattcatgtgaatttatatcttcactcattagccattgaatgagcaatccatctacaatagatcgcattgtttttgaagctttttcaacatctatactttggtcaaatacgcctgtttcctgtccgaaaataataatgttagatgtggtgccccagcactgttgataaaagctatggttaattttcctgtacgtttcatttcgggttgcctgagacaagaaatctaaataaaccttataaaacttttcattttcctcgggagagacaaatattgaatttacataagctttcaacttatctagtggcgtagattccgaatccactgcttccaattcatgtttataaattttatttgtaagccactcaagtagttgagaaagggtatcttccttattatcaaagtaataatgcacgacgcccttactaactcctgcgtgatctgcaatactttgtagtgtaactgaattataaccttgtgttgacacagcttggaaagctgcccttaatatctgattctttctttcttctgcttttttcttcataataaacctccagaaagctaaaccttcaattagtatacaacagttcatgaaatccacacaaaattattccgaccagacaaaatagtttgaccggtcagaataatttagtatactaaaagtggtttcacatcaagatagcatataggaggatttataaaatgaaagacgaattcaaggctctagttgtaaacaaagttgatgatgaattttcaattaaagtaaagaatgtttctccagcgtttttaccagaaagtgatgtccacatccaagtacactactctggaattaactacaaagatggacttgcagggaaccccaatgggaaaatcgtaagaaaatacccatttataccgggtatagatttagcaggtgtagtcatttcttctaatgatcctcgctttaaagagggggataaggtgattgccacaagttatgatataggtgtttctcattttggcggttttagcgaatatgcaagtctccctggagactggattgtacctttacctgataatttgaccctcaaagaagcaatgatagtaggaacagctggcttcacagcggcactatctattcaacgtctagaagaaaataacctatctcccgaaaaaggaaaagttctggtaacaggagcaacaggtggcgttggtagttttgctgtttcattccttaactctctcggttatcaagtagaagctagtacaggtaaagaatcagaatatgattacttacgaaaacttggagctagtacaattatttcacgggatatgacctatggagggaaggttaaagccttaggatcacaaaaatgggcggcagctgttgatcctgtaggcggggaacctcttgcctctatcttaagccaaattcaatatggaggttccgttgctgttagtggattaacagctggaacaaaactgccaactactgtttttccattcatcttaagaggtgttaatttacttggaattgattctgtatattgtccaatggaaacacggttaaaaacatgggatcgtgtagcaacagattttaaaccatctaatttaaaggaatttatatcacaagaaattactttagatcaacttcctaacgttcttcctgaaatattggaaggacaagtaagagggagaacgattgtaaatatcgtatgattattcatcagaactcatccagttgctaaagatgaaacaatgtcttaaaggtctagtaaagggattctcaacaggaattcctttacttattatagcttactttatgttaatgcaaaaatataaggagtgatcctccccattcagcttacacagtcttaatgatatgaaaacgcttattcatcgtacattataaatgtggctcctagtctggagtttcgttatgggcaaacaaaactcaaataaataggaacccaccttgtcacaataaactcaatagactaatgctgagaagtctccttacttacttcaacatgctcaaaaccctgtaaacaggttcccttggggagaagaaacatttgaaaaagcgaaacgcgaaaacaaacctgttctcgtatctattgggtatagctagctcgggtagctatacgcacatgtcattggtgccatgtttcttaaaataaccacaaaaggcaaccagtttcggctgccttttaataattttattggaaatttttagaaagctagattcaaaaactttttctcttctaatttaaatactgttgttttttcttttgattcattccattttatcttgccctctaatttgtgtcacttaatatcttcctcgggcatataatcaaaagttgaaacgtgattggtttttttcccaccgtctacaaaccgcgagttctgctgattaagaaatggaaagataaaaagctagatcaaatcatagaaacaccttattattgcctttcaaaatcctctgcataaatgaactcaactttttgactgctctcttcgtattccccttaaaatttaataatcactttcccttttggccgtccatttgcgactagttctagcgcttcatttacgttgtctatggtaaatagtgttggatgaattgctggaacaatgttgttttcttcaatgattttagtaatctctttaagttgtgcaccgtcagaacgaacgaagataaaatagtatcctacgttttgtttcttggctttgcgatcatactttgcgcccgcaagggaaaatagcatttgtttccacaatggaaaatttcggtcttttccgaagcgtttatttggtcctgtacggagagagagcaatcttccgcccgatttgatgatactcaattcactgtcaaattctttaggtcccagtgtatcaatcacgtaatccacattcgacaacaagtcaacatagttttctgttgtataatccaaatattggtctgcacccatttccaaagtgcgttcgcgcgcctctgagctgccgctaacaatgacatttaggcccattgcctttgcgattggtacagccatttgaccaaagctgcctgatccacctggaatgaagacagatttacctggctgtgcctcaagttcttcatgcaggccttgatacgctgtgagtccagccagtggtgcagcagcggcttccacgtaagacaaattttttggcatgggtgcaattgcggcagcgtcaattgcggcatattccgcaaaagcaccaattttttcgagggggagacgtgtatagatggcatctcctacgtgaaattctgttacattttttccgactttttcgataactcctgtcaattcattaccaagcgttaatgggaattcataatcttgaatcagtttcacgctgcctgtaattattaacatttctagtggattgactgccgcagctttgacctttaccaagacttcgttttcatcgatttctggaattggaatgtcattgactttggcatggatattttttgaatacttggtgatctgagctgctttcatgagtgttttcatatttttatcagcatcctctatcatattacatttattaggtttttacctttttatataatcgtttaggtggaggggaatcttactttaagcgaagtctgacttccaattttatgattaacccgccacctaaacattcgtgatttttagaacgatcattctcaaatgattaaattttttaggtccgatactgtaaataaatgtttctcatcttcctagtgttattgatatagaacatcgttattatatagatttaataacttgaaagattacatctctagaatcggatagatttgatctcttaattgaaattcatagttttcgtctacaattcctactacttgattactatcataaagctccatcataaaactcgccacttgctcaactgtgtggtacatcgggatatttgctttgtaatcaaattctgtcgtatcagatgcatttttcatgaattctgtttccgtgattgctggtgctaaaactttcaccttcattttcgcacctttgcgttccagttcttttgcaagcccttctgtaaatgcactaacaaagtatttagatgcagaataagtaatactgccaacagcaattgcatatccgagggctgatgatacgttaattaactgagttccctctacatccgaataatcacgtacaaatagtgtagaaagaattgttaaggattctacgttgacacgtaacatggtttccactttatctaaattctgatccgtgacagaagaagattcaccaagcccggcattattaatccaagtctcaatttgatattcctttaaattatcatacagtgtgtatgcctgagctgtgacagataagtcacatgtacgaatcataacatccaaatcgggattaatattctgaattgttgatttaagctcttctaatttatctaatcttctagctacaataattaagtttttgccgcgagcagctaacgctaatgctgtctcatatcctatacctgagcttgctcctgtaataactgtatacttcatattattctctcctcgaaaacaaatttttttttattagatcatccatataacaaaatagattcagtctaatgtcgacaaagtcaaatcaataatgttttctaatttttcctcatcatttgtcgtttttgctaatactcgtatccctacgagtgaattatgaataaattgagaaagccctttgatatcatagtgtttagaaatttctccttgttcttgaccatgtttcagtagatcaaataagaaggtttctgtctttataaaagtctctgtaacttttttagtaaacgatttattccattacgagatcttggctagatgacagatcataatcaactgccactacactcctggtcaccctcaattaggtcaatgccctgttctttgctgtgtggatctgaccatacgggtcaccattttgcgcggcatcaaccgtggaaggaatgccatgaatcggtttcgagccccgggcattattaacgtcttgccacgtaagaagcctcggtacccttcctcagccacctgcccggcctccatgatagcaccactctggaacaacttcgattcaccaatacccgaacgatcaacgaagccggttgacgtcagtcccggacatagagccgtcacagtcacccctgtaccgctcagttcgttctccaaagcctcggtgaacgacagcacgtacgccttcgttgcgtagtaaaccgacatcataggtcccgggaagaaagccaccaacgaagccacattcatcacgcctccttggccccgtttgaccatatccggcaagaacagtttcgtcataacagtcagagccttgatattgacgtcaatcatattcgtctcttgttctaactgcgtctccaagaacgtcccgtacaaaccgaagccggcattattgacaagatagtcgacgacgatccccttctccttgagctccgcaaaaatctcctccggcacaccgggtgacgccacatccttggcgatgaccgtcgcttgactgccatatcttttccgatattccttcgcgagctccaaaagcttaccctcgctacgcgccaccagcaccaaattatatcctcccttggcgaaacgatccgccaactctttgccaatcccacccgataccccggtgataagaacagtttttttcatttgacagcacacctccatttttagtttgaacttttaaaacgttttacagcgtttcttactgcgagtttttactatggatgtatgttatccataattcaaatttttgtatcaagaggatttatacttgccgcatatatctcaactaagacctcgccattatttattttgggcctagggaagtaaaaatttggtttttcgccgtagttttcaatcgctaaagctttcgttacaatcctccacatttttatttaacgcacatgtatcttttcctaacgaacctaagaaaaaagaatatgaatatcccttccctagatgggatattcatattaaataaattattttaagaaaggataatctgtataaccttcttttcctcctgcatagagcgtgttttgatcaggttcgtttaggggagcacctgatttaatccgttctgcaaagtctggattagctagtacccaagtgcctactgtgacaacatctgcaagattattatctacatcagacgaaagttgatctagaggacgacctggacggttaacaagaagtgcttgatcccaaagttgacgcacatcttttaggaattgctcgtttccaaagtgcattaaatgcagatatacaaggttaagcttatttaattcacttattaaatagcgatacatctcaaggctattttccccttcatcaatgccttgcagtgttccttgaggagaaaaacggatgcctgttctttctgctcctatttcatcaacaactgctttagctacttcaattgcgaatcgagaacgcccctcaatcgtaccaccgtatgcatcttgacgatgattggagttttcactaaggaattgttggatcagataaccattcgctccgtgaatttcaactccgtctgcaccagcttcaattgctgaacgtgctgctaaacgaaactcattgataacatcttttatctcaagctcactcagttctcttggtgttgggacttctttcattccttctgccgtgaaaatttctacaccaggtgcaatagctgacggtgcaactgcttggcggtggtgaggtgtgttatcagggtgtgatatacgtcccacatgcataagctgaataaaaatatgaccgccttcactatgaactttagaagttacttttttccaccctctaatatgattttctgtataaataccaggtgtattagtgtaaccttgcccatcatctgaaggttgggttccttcgcttataattaaaccgactgaagcacgctgaccatagtactctgctactaaatcgctcggcgtaccatctggtaaagctctatttctagtcatcggagccatacctatacgatttttcaagtcaatgtttccaatacgaactttttcaaataatctgctcatatgaatactcctttttaataaaaattagaatcaagaaataaatttacgtgttctgcaaatagttctggaaattgaaacagatgcccgtgaccagaatcaggatatataatcagctgtgctttgggtaatttctctgctaagatgtaactgtttttagttggtaccattacatcattaacaccattagtaacaagtacagggtgtttgatgttttgtaaccattcataatcatgattagatttttgtttagcccattttgcaatggcttgtaattgtgcctcttttacttgttctgaactgtttacttttttctgattaaaaattctttgtagtgaagccattcctgcagatttacttgtttcggtttgtgcgtagaaaaagaacataaaatcatttattccatcttcttccgttccgccgtgacgattcattctttcaaaaatctctggatttggattaataccagattcaggcgaagtacctgccataataatttttcttactaaatctccttcttgtaaagctagctcttgtgcaaccataccaccaatggaaaaaccaagaatgtcaacttgttctaatccaagagcttttataaatgttgctgtatcttttgccatatcagtaattgtagtaggcgttattccatctgtctcaccaacccctttattgtcaaataagattactgggcgtttatttgcaatcggttcaagcatgtctggatcccagttttccatcgttcctctaaagtgaacaagaaatactagcggtataccatcttgtgtaccaaattttctatatgcgtaacgagttccatctgcttcaataaattctgattctgatggtattttaaagtttgtcatttttgtgttcctccttagaaattaaaaaacgattttataagtatgcattatgatggtttgtttcatgctaattttagaatgaacgttctaaatagggtaaaaaaaagaaagctagtccaacactgaaagtgctagagtaatgatgccttctaattcttttttactgtaattagtttttattagtactcttatacctaccaaattgttgtgtaagaaacgagatatgttatcagaatcgatttcttttgatatctctccactagtttggccccgttttataaggttattaaacatatcttcagtacggttaaacatttttgtaactatgcgtccaatttctttgtccaacaaagataattcaatggctgcatttactgatagacaaccttttgggtattgttcaatggaattcagtacgaaaataaaaacatcacgtatcgcctgtttaatggatgaagttctgctaattatgctttccatctcattgacgacgagctcttcatagtgattaagggaagctaaaaacaatgaacgcttgtcaccaaatgtgtcatatatactcctgcggtgtatccccatatgatttaccaaatcttgcatggatgttttttcataaccctgttcccagaaaagctccattgcttttcttaatactgctttttcgtcaaactctttacttctagccatttttttctccttaaaaaaatcaatgaaccaatactaacaaaaacaaaagtcataatccattgtagaatgaacattctaaaatgaactcatgaatttcaaaccatgattaaataatatcctttttagaacgataagtaaagaattataaatttaattatcaataatctctggaacaatgtgcattctcatttgagtagcaaaacagttagatctaacgtgtttcaagtatagcaaatttgagaacgatcggtaaagaatttataattaatcatgtgttttatatggctatgcgtagcctgaatttttatgaatatcgttccattttatctctactcaaatcagttctgcaatgtcactggtggcataggatcttttttatattagatgcacacaacaacttcatccaaatacaaaaaacgaatgggaactatatactagttgtttttttatttacagtctaaacaaagtaaaggaagtattacttgaataacttcttttctccaaacgatagctagccttggcctattctaaagaacattgtcatttttgcaaattaggaaactaatttatcatagctagccttcaattaaacgttttaacttaaactcagtttcagtatcctcaactggagtatagacgctgcatcttaaatcagtatccccatgcacttgtaatgaagtaagattaaacaacattttacctaccttagcatgacgaaactcaattaatacttcaggagcagagcttatctcattttcgttccaaattttacgaaactcaggatatgcctgttccatttcttgtataaattgctcataccagtcgtcagccacatactgtccataatacgttctaaatattgcgatatatcctctaacaaaatgctcccaattcactgctaaacttttaaattcctttcttgcgaataataagcgtattatattcctttctgccgggatgatttgttcaaaatccaaaaatacattagctgctgcttgattccatccaacaatctgacttcttctatctgatataatcgttgggcaataacgcagttcctgcaaaatttttactaaagccgggctgatttccttctcattctcatttctaaaaggttgtttcactccttcctctaatgctagagcatacaaatatctcctttcatcgttatttaattgtaatgctctagaaatagcatctaataccgaagtagatacttttatatctctaccttgttccaaccatgtataccatgtaagacttacaccagctaattgagccacttcttctcttcttaatcctggtgttcttctgcgggttcctacaggtaaaccaaccatttgaggagtaattttcgaacgttggttctttagaaattctgataaagcttgaagtcttgtttcaggtttcattaagatctccctttaaaatagtattaattatactaggataaacaacaacttgtaataggataacacaatagctaaagttaataaaaacaaggagggaattatcatgaaaagagttgtcattactggaatgggagttatttctccactaggaaatgatgtaaatagcttttggaatcaactagttaaaggacactcgggaatatctctaattgattcttttgatactgctttttataaaacaaagatagctggaatcgttcgtgatttcgatgcagatgaaatattggggagaaaagaagcaaaacgattagatcgttttagtcagtttgccttagcagcagccgaacaagcattagaacattcacaattacagttagataaggttgatcttgaacgtttaggggtatatgttggttcaggaatcggaggcatacaatcgcttgttgataatgtgaatgtattgaataaacgaggtcccgcgagagtaagccctagccttgtaccaatgatgatttcaaatgcagctgcggcccaaataagcataaaattaggagcacaaggaccatcattatcaccagtcacagcctgttcaatcgggaacacctctattggtgaagctttcaatgctatccgaaatgatgaagcagatattatatttgccggtggagcagaagctgcaatcacacagatttctttggctagttttggaaacgcccatgcactatctacaagaaaccaagatccaagtcgggccagccgtccgttcgatacagatagagatggctttgttatgagtgaaggcgcaggtatcttagtattagaatcattagaaaacgctattcttagagatgcgccgatattatgtgaagtagtggggtacggagctagttcagatgctcatcatatggtagcatcacacccagaaggtaagggtgcctacttggcaatgaaaaaggcattgagaagtgcaaatatatcaacaggtgaaattgatgttattagtgctcatgcaacaagtacacaggtaggtgatcgttcagaagttctagctattaagaaattgtttggtgaacattcccgcaaaattccaacaactgcaaacaaatccatgactggtcacatgcttggtgctgctggcggagtagaagcaattgctttagtggaaagtttgagacgaggaattattccgccaactattaatgtagagaagcaagatccagattgcaacttagatgttgtatcagaagcaagacaccttccattgaaatatgggctatcaaattcttttggttttggaggacataattcagcaatcttgttaaagcattacgattgaagacccatctttatagttcaaaggtgaaataatgaatctatcaagggtttatagcccttgattttcattatggaatacctcacagacaaatgatgacgggcctcagctatctggtatattaaatagaggaaagagaatacttaaaaaaacatttagaaagaaggtgatcccatgccaaataaaagtaaccccaatagattaatcaatgagaaatcaccatacttactccaacatgcccaaaaccccgtagactggtatccctggggaaaagaagccttcgaaaaagcaaaacgtgaaaacaagccggttcttgtcagcatcggctattcaacctgtcattggtgtcaagttcgtatagctacacattatttaaaaaaggacacatataaatatgcatccttacctttttattaacagcaagagttcgttgtactatcacttggtggtgttacacaacaagaggaggaatcttgtttttgattctcgctgttcgatttggtatagaaaaattcccattcattcctatttgggtcagtaatccaaaatttatcttggactgcataacaacaagttgtatccatttcttcacgtgcaaaaacccctctttttcaagcctttccttgtgtttcaaaacttcttccaaactatctacttggaatccaaaatgattcacttgatttcccgtcacctcgtctacgacatttaaagtgaagttcaatccaggagtctctaatagaaacttagcatagtctgtttttactttcacagcctttactccaaatactttttcataaaaatcgatcgatttctccaaactgacaacgttaacccctacatgaacatatttcattttaattccccctctaatatattaatcaaaaaaatttgatttaatgactaaaaattttttagcaacaatctccttcacctttttttctaaatacacaacaaagctcttctgataataaactatttacttcctcatcatttaaatcataatagctccatgttccctttgtctctttcgttattaagttggcatctaataaaattttaagatgataagaaagtttagattgtgttacctcaaaaatctcagtcagatcacaaacacaggtttttcccctttgacaaagttcatacatgatctctaatcgtttctgatcagcaagagccttaaatttttgttcatatttccgaagtagttctgatttcgtctcatccattcatatcgccttctttaatcaattttttttgattaattatgaaacccactaaaagctagtgtaaccagatagaggttttctatttttaatattttcctccatcgctactacaacaaggttacaacttgcttttggtggcaagtcatgaacacctaaaggagaggagatttaattaatctaaagcaaaaaatacaccaatatgatttggtatcttcatctaaatcgagtccctcaacatagtaaatcttcatctacaaaatactttcattacttaacatatatttaagttccttaatacgcaaaaaagttattgcggtctcaccgaaaatttaaattgcggtgccctattgcctttttctgcgaaagaaaacttgttaatatttacattactagtagagttaagggaagggtgaatatcttgatatcaatcacatcagctgaagtgggaatgaagattaatgaatggcataggcatattcaaaaattcaatgttacggatgctgaaatgttaaaggctgaaatagaacgtgatatagaggttatggaagaagatcaagacttgcttatttattatcaactaatggcctttcgacataaaatcatgctggagtatactctgccatctgatgaaaatcgaattgaactttcagaatatttaaagaaaatcgaagggcataagaagaagctagacaatatgcgagcgtattattataacttcttccgcgggatgtatgagtttagaaacggtgaatacacaaaggccattacatattacaaaaaagctgaacgcaaaattccaacgatctccgacaagattgaaaaagctgagttttattttaagttatccgaagtctattatcatatgaaaatgactcacatctcaatgcactacgctgaactttcatacaacatctataaaaaacatgaactttattctgttcggcgtattcagtgccattttgttattgctggcaactacgatgaccttgaaaatcatgaaaaagctctcccccaccttcaagaagctttaaaaggtgccgagctgcttaaaagtaaaaatactcacatctacgccacagcatttttcaatctcggtaactgctatcacaaaatggacaacttaaataaagctgcacgttatatcgagcaggccttggttcaatacagaaaaataaactctgacgtacttccgcaagcttatcacgacctagcgttgatttattttaaacaaggcaaaaaagaacaagcaatggattgcttccgcaaaggaatcagaagtgctgtagattttaaagacgaactttttatgaacttatttgaagcattagacgttctttatataagaaatggcgatacacctaaactcctcaacattttttctcgtttagagaacggcaaaggatacccttatctggaagagctggcattgttaggaggcaaccttttcgattataatggaaaaatagaggatagtatcatctgtttcaagaagatggtatatgctcaaaagcaaatatcgaaaggggaatgcatgtatgaaatctaaattgtttatcagtttatccgccgttttaattggacttgcctttttcggatctatgtctaatggcgaaatgaaggaagcatcccggaatgtaactctagcacctactcatgaattccttgtttgattcgataaacaacattagttctgattccctttagccgtttcataacggctttttcttattttagacatgaaaagcatttcacaaaagctggtcaaacccaaaaactagaactagatcaaaagacacagatcgaatgattcatttccaccctttgatccacataatacttagtttcatcattcttccatggtaatattttgttatataattaaatgagagggtatgaatatgaaagtctttgaagctaaaacacttatgtctgaagctacagaccgcgccaaagaatataaagaactaaggacgcaaatggtcaacttgagaaaagctttacaaagcgtcgctgaactggacgacagcgagttctcaggtaaaggcgctaataacattaaagcattctatcacgatcatgttggtgtcactgatcaatggatcgactacattgacatgaaaatcgcattctttaacagcattgccggagctgtcgaggacaagggcctctctgatgcttatattgaagagtcttttttagaacatgaactggctaacgcccataaaaaatcaaaatccatcatgtctgaacagaaaaaagccatgaaagatatcctaaacgatattgacgacatccttccgctcgacctattttcaacagaaaccttcaaggatgagcttgcagatgccaatgacaaacgcaaaaaaacaattgaaaaactaggtgatcttgacgaagatttactgacagaatatgctatgtcagaaccaaatgaacaattcatcaagtcagacttccaaaagctccaagaagcaacgggcaaaggcaaaaacgctactcccattcactacaacgccaaggcgtaccgtgagagtgatatacataagaaaaaaggcgatattgagaagcgaacggaagcttatttgacgattaagaaagaggaagcgaaggaacgcgagataaaagacttaaagaaaaagcttgcgaatggtgtctcagatccggatgagtatttagaaattgcgaagaagatcgggtatgagaaccttgaacctgcacagttacagtatgtggtgcagctagaacaagcaaaacagctgaagtccgtcggtgaaagtgtaatcaatgcgggtaaaacggcattggatatcatcgatggggttaatgatgggcttaacgatgcgattgatgatacgatatatggcatcaaggacttggttgtaggcgcatgggaattttcacagctccctatggaactaaaacttgcaaaaacaatcacaacagtcttaagtgtcccctcctaccctaaaataatttggacaaacatcgtcgattcatggaatgataaaatgataaatggcaatgcatatacaagagcacattatatcagttatgcggtcggtaatatcgttggtccaaaaggtgcaggtgctgcagtgcaaaccactactaagctctcaaaagtgggtaaagtggttgaaggtggaacagctactgctcatgtcaataaagggataaaccaaggcaaagcttacattaattctattgttagaaataagaatgatcttgcacttgtcgggattgcccaagacatcgataatacgtataatgcaaagaatacgcctttattaaaaaggattattgaagataaaaaagagagtgtacttagaaaatccgagacgtctaacaacatgggtataggtaatgtcaaacaaggtgatagtacccctctcgcacctggtggaggattagctgctcatgaggcaaaaggcgggcatcttatagaaagacatgttgggaagaccgacgaagaactaattcaaagacttgataagagcaaaatgagtaacaagaagatatccggttcatcatcatttaaagatagagcaactgcagaaagagttgctaatagtgctctcacaaataataaagcgaaaatagaaaaatggttaaatagtgatgtgaaaaagcctttagtactctcttataaagggaatgaagttttaggaagaggaataccaaagggagaagatacaattactgatttaactaatgctaaaattatattgaaaaagaacaaagatggtagctttatattaactggctacccaacgaggtgataccatgatagatacaaacatttccgaacctgtttttcaatttctaggaggtatttttcatcaagatatagaaactccagaatcagcactggacgaatacttagaagagattccaaaagaagagcaagaaactgatatagtagcattaaaagattttattaacagtgattatacggatgaagaaaagaatgattttatcgatgaagctgctgacggagtagacattcgtagttacggagtatctccattagtatggctcgaacaagttattcaaaaaatagaaaagaacattgaaactttataatccataaaaggtcccttgaaaattcaagggaccttttattacttcaaaagccctttaatttttgctttcgttttcggtccataaatgccatcaggatttagtccattcatcagctggaaccgtcttacggcatctgctgtttttgggccatacacaccgtcaattccattattcttagctcctttatccgggtagaagtatagtgcagccagtgctttttgaatttgccttacgtcgtctccttttctcatcgggcttgtcactttatagatgccggaaggcagcgcatatgacgttttcttgctgcttaattttgttgttttctttttagctgtacatgttttacttgtgcttgttttcccacctagcgcttttaattctttttcaatggcaaccttaacttgattccatcttccctctgacaaaatacggtgcgggcaatacttaccgttccagtcttggtgcttacggacacgatcaatgccccatccgcgttctttaagtagctgcgccacaaacttaatagcaagattttccgctgccttatatcgcgcccctcctgacttgctataacaaatttcgacaccaatcgacttacgattgcctgtaccgtttgttccatctcctgtgtgccaagcgttacgattcgttggaattccttgaatgacttgtttatcgtctactgcaaagtgaaaactcgttgagctagagttattcttcatgtaagaaatctcattggctgctgaagcatcattcgcagtgttatggatagtgatatactcagctttcattgggttaggacatttcaatccatattttgatttagaaactaaattctttacaactttgatggccatatatcctctctccttctgtctgtgtaataaaaaaagccactggcttagccagcagctctgtcagcgttattcttactctgttctttttcgttctccattgtttgtaatcgatctgttattgttgatgggattttaacaccgatctgtgctaagttttcagttattgacaatccttcattagcgacagcttcctgacgcacgtaggtaaaatatccctatgtgtgtcgtacacctctctgataacaagtgcagttcgtttttcttgaagcaatttcagtacaattttgagtgccacatgatagcttttggatgatccataaccacccacaagaaactgaaacttttgattccaatcaaagagaaattctttaaaatgtgggtttacttgtttaatcatttgtcatcactcttgtttacaatggtgatctcaaaaggtttatcttcttctgtaagttcttcagtctctaatttcttcttgtctatacttaaacgcatatgctctaatttaaggcgtcgttcgtcttccgagtgggctaattcatcaaactgtttaataaagttcctgagctctgccattgccctagattgagcgttcaagaacgttgcatgaggatcccaagaaaattggaattcatactcttcctcttcgccttcgttcacctcagataggatagtctttttctttttcagttccttaatcatttcctgcttatcagaaacgaacatgattttttgcgctcttataattgcggcatattgaatctgaatttggtcccatatcatatcaacaggggatcgctcctgtattccttccatgatcgatagcgtttcttctggcaggaacttagagaagaatccatgagtcacagcgttttgatttctcagtggagctgcaccacctttatttcctaatgcatttttatttccaagcggtgctcttcctcccttatttccttttgcatttttgttccctttaggtgcgcctcgacgcaaaagagcgctccctttcgatttaggagcgctcccttttattttttcttcccatttatcgtttgctttccattttcggacagtgctacttgttacgtttaattgctcagcaatgtcttttaacttcttactcccgccgctctcttcccacaaacgaaaagctttgtctctgcgtggatctcgtggtcttggcattacatcttacccacctccggatctcatgtttgagtttgtgtttgttttaatagtttttttctgatgtgtctactactgcacctttagacaaaatattcattttttcttatttagacttaaatctatgtcgaaaattattgtttgacatatcttatactaactccactaaaagaggtgataacatgtcaaatggttacaatagctccttcgtgttagttgtggtgttgttcatcctgttaatcattgtgggtgcttcattcctttattagtcttgaaatattttaatctactattaaaggaggtaactatatgggatactcgaatggttatggtagcactttcgcattaatcgtagtgctattcatcctgttaatcattgttggtgctacattcctttattagtctttaggcactttaatccaaagcggccttttggatttcacctccctgtacgaagacgccataagaagtttttatggcgttttgctatgttattaacaacacctttaaattgtcaaaataggatagacaataaaagagaggccactttaaaacctctctttttaattaattgttttcggaaatccttaacaacaaggttttccgcagtacttatgatgctcagtgacaggatcgtaacttgagtaactatgcggaaagtaatgaacatgctcataatgttgatgattcacgctagttgtatgctgcggatgaatgtgaggaacaattgtatttgagaacgtatgatgttcacaacacttagtcggatgcaaaattggaggtaaaattttgcaatgatgcatattttcttctcccttcattattttttatctgttataaactatgttcagaagcatctaatagtactattacaaccacctatttactgctccatgaggatttatcaaacaaaatcatgcacatcacaacaaaagctgtatagattacttattagagcaactctccactccacataaataccccatcgctctgccccacgtttctccaactctttatgatcaacgtggggttttattatgaaaagcgctcctcaatatgaatagaacccatttttcttggaaataatcctcctacgaacgaatgcacccgttattagtgaattcgctctaaaagcctcgtttgatagagcccattcaacccttatcatcatcaaacatgaggctttattttgtttttgtcgggaatattaatttttacgcaatactgctggtgttttatcacccgaattcactgtataaaacctcccagttgagttgatcctcgcttatcgctggggggttttctcattccatgaatgtagtggtgacgcaggaataattcgccgcgccgacctgcctcccattttacactacagattttttcggattcaacaagcgctcaaagtggcaatcttggcataattggctgatcaactcgtctttcattttgcgtacagtttcccttgaaatgccaagatgaagacctattgcacgataactcatcccctccatcatgcaatcataaataactttgtgctgctcccctttgatcttttctgcccccaactcaactgcatatactcgttcctcatagtacttaagacgtttgaaaagacgttcctctctcatatccatttgctgcaattctgcctgactcttcccgggacttccttttggcatagctgcttctaatccatattgtgcaacgccccaatttttcattgggattactgaaccatagagcactctctgcaatcgatgaacctcttttgccatccagtgatagctattgattagattttcaatatcttttcgattcatgattgtgttctccttttccaaataaaaaacggacaccaaacaaacagtgtaatactgtaagtttagtgtccgcaggctttccgtcttggacttaagtattgtttttttctattttaatctcgataggtttatcatataaatcttctttcttcttgatcatagttttactgcataaattgtggttactttcatttcctaataaaagatattctctatttatcgaatgtaatatataccatgtttcttttccatcttttatgtaaactttcgtagttttattaaaattaaatattggttttaaaagggctggaatatagcaagaaaaatatacagagataaaaaatgcaacaattttttgagtatttgtctcaaattgaaaagacaaaattaaaccattgagtccagtataaaaatacaaaaggattattaaatatattattgcaataaagatttttagaggtttacccttaatcttttctatgaagatgtaaagtaataaaaatatggacactaacattataccagctatacttatccaccttataatctcaagccaattaaagttgggattataacttgaaataagctgagctattgagacaaaaccgagcgtccagatcaaaacagaaatacaatatatccccaaccttataattaataattgttccttggagtaaaactttttttcaacaatacttgaagaaaacatagtgactggattccccgctcttataagttgtactattaaaaatccaactgcacttattgcaccaggaaaccctaaagaggctaataattgtttaaaagtatcttcgattttaatcaccactcttaaatttcatagttattccattttaccaatttacgctctccttctcaacgcctattattagacgtatcgggtagtaaaaagttgattaatcacctggttttaaattcaaggggataacaactgttggttaattttattatgctacacaaaaaaataattgatcaaatgctttttacctcaccttaaatcctatctcatgatcaactcttgcaaagctcccctttacagtttgaataacagtcttaccgtgctcaggagcatctaagacatgagcagttccctgattcccatctaaaacaatgatctgaacttttcctgggtcaattttctgctgaatagtgaagtcttttttgacgttaatttctcttggattgtacactcaaagcgccccctatgttatgatagaagtaccagttcatatcaagaacactgaggctaagcgcttcggtgttttttatttttaggcagaaacctcttttatcatgatttccaccctcggctcttcgctataaaacttactgactttcaaatccaccacctgattatcatctttgtatatcaactgattcaaagcactttcacaccctttacatagttatcaacatcaggctttgtagtaggccgcaaaagaccattttcagctttctctttctttttttttgagtttgaaactgacttaggcattggtctgtacactttgaaacaggaccagtaataattgtttctggtcgatgctgagacgcaaccaaagctacatactgcttaaaatactttgatttcgctggatttcgcatatgcaccttcccatttctcgtattgatccacgcggctgtccttgtgcgactggctcaccataaacagtgaacttaatgcaatacaactgttctttacctcccgtcaagctgttcccatagctcaatttctttttctattctcggtgcggagagtaaaattgccaacagagacacgactgctttaagcactcagcatccgctccatttgctttattttttcctcaagtaaacggattgttggtgtaagatctttaccttcagttggatttgaaggtccaaatatataaagtccaccaattactttcacattcgtttcctccttcattcccaatcaccttacctatgatttaattgcattcgatcgcctttaataatcactatgtaatcacgacacatctggtgaattcgtgaaccaagagcctcgtctatatccaaaatctcatcgactgttaactcagaagaaatcagcaaaggcttatgattcaaataacgataatttaagactgactggatttgttcaacctgccaatcggttgcccttggctgactgtttattggtttgaataagtcatcaatgaataggacttcgacctttctcatgacatcgagttttacaactaagttgtcaagttatgccagcaatacttatgataatcttctggaatcatggtacttgcaaggaaagaaaaaatgggctcttaaatccgtttaaatctaaacacaaaagaaccgcaactggcggttcttttagtatatattcctatttgacttcattattattggacagtaccataatcaaaatcaatatctttcttgtctaaatccccctcaaaatttttagcataagtcattgttaaatgtacgcttttatctatccaccaagttccatcatcagtattagtatcccaagtaacatctatatctcttcccaaattctcaaaaaacaccaaatttccaacagctactgtttttccgttgattttgtaatatattagaacaattttcttatcaaatatacctgtcccgtgctttacgattgttaaactataaggcttattaggacattgctcttcaagtataacttcaggatttaaaaataaaacataacaaatgaatagaattggtacaatcgttaacctttttaatacttttttattgatatttaacctcttcaacatagtcctccctttttaacaatccatttcatttgggatacaccctcatcattgaaggtatttcctatgaaaaatgattttgaagctcataggaacccttacatgacagggtttttgttgttttttcattgtctattaagatctaaatcaaaaaaagctataaaaaataaggaatgatacatattatacatgactaatatgtatcactcctttagtttttgttcaataatcgcccccgatagtgggataagaaatagcaaaagaacttgctatttctcaaatacatccaccaaatgttcaatgttagtttgtttttcatacatactaataataaaagtaaaaccttattaaaactttacaacacaaactgaatcgactatagtctaattagactaaaatattgatgtaaagaagggaaaaattagatgataaagtcttttttaatgttggggcagtcgaatatggccggccgtggatttttgaatgaagtagacccgatctataatgaaaaaataaaaatgttgcgcaatggacagtggcagatgatgacagagccgattaattacgaccgtccggtctccggcgttggcctggcggcatcttttgcagatgcttggtcgaaagctcatcctgatgaagaaattggcttgatcccttgtgccgaaggtggcagttcattgaatgactggcatccggaaggcatcctttttcagcatgctttgtccgaagcccgcttcgccctccggtccagtcaaatttgtggaatcctttggcaccaaggtgagagtgacagttatcgttcgctacatgaaacttattacgagaaattaactcttatcatcgagacactaagaaacgagttggaacttgatgaggtaccgttgattattggagggcttggtgactttcttggaaagaccggttttggacagcacgcgactgaatttcgacaggttaatgaacaattgctgcgttttgctaatgaacaacagaattgttattttgttactgcagcaggtttgactgcgaatcctgatggcattcatttagacgcagcttcacaacgcaaattcggttaccgctatttcgaggctttttcgaaaaagtaccatatcctgaaacccatttcgggagaggagcaatcgctgaaagtgaatggtgactattctaaaacagaacagatttaccttcatagtatggatttggcttcgggtaaaatcacgtacgcggaatttgaggcgcggatggcgaaggtgatgaaaccatgattcccttacttatccttggcttgctaatccaaaaccccggagctcacggctatgaacttttggccttaatggaaaaacgtcattacaaatacattgttaacttcacgaaaggttcattttattacaatctgcagcagcttgaagaaaagtgttttattgaacagattgagcagaaaccctcaaccagcgggcgtgaaatccgtaactacaaagtcacagattcgggaagggcagaattcgaaaaattaatgatcaaatacggcgccaaatcggaatatgtgaacctgcaattttatggggcgttactctttgcagatgaattcgacaaaaataaattactggatctgatccaatcacaaatcgatcagactaaaactcgaatcgagctccttgatgaatacctgtccatcactcaagaaattcccggcacaatcgattactttcgccgtatgaacgaaaattcccgttcacatcacttggttaatttagagtggtttgaaaaattgaaagcagaaatagaatcaactattgcagaataaaaaaatgcaaagttaaaaataagaatattagttacctacatataaaacctgtgtcgtagatatttagtaacatcttttatacaggttttatactccttctttaattaaacaagtaatagggttgtcagcacttgcccccaacaagagcaagtgaatcagctccgtgttcttcttttcaatcgctagccgttagtttaattagaattcaaataatccaagacgcggtgaactctttcgctgactgagcaatcgccttcaatttttaacactggacaagataaatctgccatccaatgatcatgcaaagctctacttctgacttccattccagcagtatcatataaagaagcccactctaaaaatgcttttgattgttcatatttactgccaccggctaacacttcatttccataacgctgaaattccctatgccttaatctctcaagccgtatatcttgtggaatccataagaagacgacaaggtcaaaataactttttagattatcgccccagccacacactgcaccagaaagaatccatttctcatttattgttaagtctttttcaagcaactttcgtctttcaggaatttctctttttttagtgaatttatctaaccaatagtaatcatcggtatcaagatgcgtatgaggcaaatgctttgataatgcagcacccaatgttgacgttccgaccccagaggctcccaatatgtgaatattttttttcatacttccccctccttattaagcaaccaaactccctgttgcataaggtacttactattattttgacataaatccctaaagacctttacttttctagagaaatccagatgcgtgttaaaatcatcatacttacgaaaacagtcattattaaacggattcatattccatctcctcagatgcattttcctatgaaaaaagtcttgatttccctataatatttaaacgaatccaatttttagattgtcgtctttaaggaggtttttcatcttgaggtatacaaacagtcatttagaggattggattgaaaacttatacagaaagattgatattacagagcctgaacaaattaattttgaacggattgccgaggctttagatattaggctgtcgtttaaacctgttacaagcttcgcacttaaacacagcggaatttataatatatgcttggacagccgtaaaagccgaactgaacaatggtatgattttgctcatgaattttgccatatatatagacatgaaggcgataaaaaaacaatgcctgcaacctggactgattatttagagtggcagtccaattattttacatatcacttttgcattccaactttcatgttgcgtaatattaatctttcgtacatacaatcccatgcaattgaaaatgtagcttggttatttaaggtgtccccttcattcgctaagaaacgtttaagcatttattacaggaagctgactcaacatttatttaatcaaacagttacgggaaatctgtgcaccccccttttgtaattaataatgaaatcctcatgcatttgcgcgcattgaaaaaaacaaaaaaagacgtctcccttcacgatccgatcgggcaggataaggaagggaatgaaataagcctgattgacgttttgaaatcagaaaacgaagacgtgatagatacgatccagctcaatatggagcttgaaaaagtgaaacaatacattgacattttagatgaccgtgagaaagaagtgattgtcgggcggtttggacttgatttgaagaaggaaaaaacgcagcgagagattgccaaagaactcggtatctcacgcagctatgtatcgcggattgaaaaacgggcgctgatgaagatgtttcatgagttttatcgggcagagaaggaaaagcggaagaaggcgaaggggaaataatgcagaagaagccggatctcatactccggctttctctatttcattaaagtttttttaaaaagaaaatagagaaaaaatatataaaagagtgatgaaaatcagttttgtcatcactgataaactcttcgagaaaagcgtctggatcatagcagatggcttctctcttatggggcgttacttccctccatcaagcgattctaagccggacgttctaaaagctctcctgagaaaatccttagatcggtatacttcagtacattcctagtcactgctttctttatagaggcctcatctatgctgtcgatacccttacatatatgactatcacaatgagaggacttttaatgaatatgaagaatcagttaaaaaacattggttagaagcagttcattttaaagaactactcattttatttcttcttcaattaaatcactggcgtttaagtacaattcttcacaatctcttctgttgactccaatccctaagtagtgctcctccagtacggtgacacatatagagggacgagaaaatctcatttaaactgcccatccgatggcgggcagtttaattattacctctcctgttcctttatcaccctctcaatcccatataaaatcagtttcaagccaaactcaaatgctctgtcagtccccatcaactcaaacagcccgttcgtaaacatcctccggaataatcccgcatctgtctcgctcatggaatcaagaaggcgtatcatctcctcccccggatgctcttcttggtccttcaggatagcagtgacattgcgctcatgctgataatcgtctaaaacgaagtagaagacatagtttacaagcgtagtaaccacttgcattttctgctcttgcttaagtggtgttgattccacgcagagtaacattcggttcgtgaatcggatgatgtccggttcatggggcagcgtcatcatcatgagctgcgtagagcaaggatatcggctgagcacgttccgtaccgttatcgcaagccccatcagctgctccttccagtctccctcggagtggaactcctccagaatcattttcgatacttggttagccagacgctggtaaagcttctgtttgctcttgaaataccagtacagagagggagcctgaatccctagcctgttggccaatcgtctcatgctgaatgtttcgatgcctccctccccaagaagttcccacgaggtttctaaaatcttttcctctgaaatctgaggctgctgctttttcatattatccgtccttttatctaacagtgtaagtttctctttacaggtttataaaatgatgataccatctaacactgtaagactcaaactaacagtgttagattaaatataaacaagaaagaagtgaaatataatggatacagaaaacctctattattttgaaaaagcaccgatcgcaaaagctgttgctcacttcgctataccgatgatgctaggtacatcaatgagtgtcatatattccattctaaatgcctttttccttggtacactccacaataccgccatattaaccgcactcgcattaaccttgccgttatttgcaatcattatggcgctaggcaacttgattggcatgggcagcggtacattcatctcccgtttgctcggggagaaaaaatatgatgatgtaaagcatgtatcctcatttgccttttacagcagtttagttcttggtcttattgtgatggcagtgggtctccctttaatcgatccaattgttcatggcctgggggcaacatctgactccttcggcttcacgaaggactatgtcatggttatgcttattggttcacctttcgtcgtattatttttcacgctggagaatatcgtgcgctcagagggttcagcaatcacgtcgatgaccggtatgattctcagtgttgttgtaaatattatgcttgatgcgttagtcatcttcgtatgccattggggtgtaatcggagttgcgtctgctaccgtcatttccaacttggctgcgagttcattctatgccttccacatgggatataagagccagttcttaactgtctccgtaaagtggttcaaggttggcctggatattctgagcaatgtattaaaaatcggcattccggtctttattatgagtatttttttgggggcaatgtctcttatctttaatcattttcttgtcgaatatggggacaaagccgttgctgcatacggaatttcatcccgcttatttcaatttcctgaatttattttgatgggactatgtgaaggggtcgtaccgttaattgcattctcttttacagcggataaattacgcatgaaaaataccattggatttacattaaaagcgattgtgacgctagcagtaatgtttggcgttatcgtctatttaatttccgaccatctaataggtttatttacaaatgacccgcaattaattaaaataggcagctacattctacatgttacgtttttatccatatttattacagggatgtcctcattatttactggtatcttccaagctaccgcgcaaggaacggccgcttttgttatgtcatttatacaaggaattactctgattcctgtattgttcatcgccaatcaggtgaacggctttcatggggtggtttggtcacttgtcattgcagatacagtcgcattccttgtaggtgccatcatgctttatgctttgaggaacaaattgcagcctgaattgaatagttaagtgctagtaaacatatgacatttaaatccgtattgtaaactaatcaaatatgtaaaaaaagatagtttagccctcataatcggctaaactatccccttctcaaatcctcccactttattattaatgtggtttagaagaattgaacctgcacgagttattccgctcactatcattgattatgaagcttatatattaaaaaatggtgagctcaaaacagtaaacgtcgggcttttttactctcttccttttaaatacacgattagaatcatcaaaaacaataatgatatttacacaaattgcgatttacgcaaaagtcaccactcctcttttcatggacagaaaaagaggagcaaacctatgtctgcgtcttaacgtttttctttgcacaacgtctagtatcttctttggatcaatttttctgtaagaaattcaacaagtgttactcaacgacatgaagaaattgtttatgtccttgtcatttcagttattcaactattggtgtaagtgaactaccagcccatacctctcccttattaagggtccagctgtcattataaaaattagacccacctttattaaccgaagggctgtgaacctcatcccaagttagaaagtacacggttttcggatatttttgtttgactgtattaagaaacacagcataatccaaattaccatcttgtttttgtgtgccgatttctgtgaacgcaaatggcttattaagagctgttaactcatcatatccttgaattgtaaaatcatctgagaaatacgcatctaatccaacaatatcaacatatgaagatccaggataaaagtcagtcttaaagtctcgattggcgtccggtgagtaaacccatatcaggttgtccaaacctcttgtatcagtcatataatgatagattttttgataaagttgtttataaagtgagaagcgctggctgtcttttttgttatattcggttagtccccaccaaaaccattctccattcatttcatgaagaggtctgaatagaacaggtacaccttcattttttaactgatcaaggccatctgcaactttgctcagaacagcctctaatcgcttaccctctgtagttgatgagtctaagattttttcatactcactgtttgaaatatgggaagcatttttcccaaaagtactggatgcaggattagctagatgtaagctaatctgtggtattccaccacttttccaatatgagattaagtcactgttgcaactatagtcgatcgtctcagtaatatcagaaatatagggcttctccaaccatccactggaatagtcacaaccataaattgcgggtaactggcctgtagcattcttaattcggttggcttctttcatggaaaacgaagcatttgtgaatccgccgaatgtacctgacagtatgcgattttcagatcggtttggcagatgagccagccaattcatcaactctttcgttgttgcctgtgcattaggattcacagggtaaactgtatgagcaagagccgactgtgaaaaagatgaaaggattatgaaagatagtaatataaaaacagcaatttttttatacataatattctccgtcttctactttttattattttaatcatttattctgttaaagatttataaagcacagaatctattaagtcatttacgctttttcatcccctttcatatttaaaataagagagaccttccttagagatatttgcatttacccattgtaaatctccattttttgggcattaattatattaaaccgaaaaatatcttctttcatcagacgtttcacctattttttactgtatgcctcacagactataaagcaaactttcccttttgcatttaaaccttattacctatttcattaagtcgaattattttcgatattaagtggtgaatgattttcactctcttttttatcctattaaattattttaaaaaataatcaaaaaacaaatcattttgatccctattcatagcagcaaacgttacttttggtacaaagtcctttataaacagaaagaggagcaaacgtatggtttactcctctaacttagtttctttcttcttggtttttcataatctgatgttttccttaacagcagttccaacccgtcactttctccgcagcatataatcaagattctaataccaatccaaaagttattttgatctactgagaattttaatttgcggtgccctattgcctttttctctctctgactcatagttttaaaccattcaataaaaaaccctcaattgatgtttcatattcatttgattttcaaaaacttcagccgtatcaacctgttaatcttacccgctgacttatatcaaaggagctctaaccaaattttaatggctgtcgaacttattaatagcgctaaaatccattgcaggaattttgtatttactttttgcccaactgatgcgccaataggagaagcaattaaactagcaatcataagaaccagggctggtacaaaaagaacctggcccgtaattacttttccaactgttgcgccaatagatgaaagaaatgtaatcgcaagagatgaagcgactgtgattctaacaggaatatttaaaatcgataacataatggggactaggataaaggcgccgccagctcctaaaatacctgatacgccaccaatgataaacgctagggacgaagccaaccatttattaaatatcacttcttcgccttctctatgggcttgtcctcttttaggtataaacattaaaataactgctataatagccagaattccgtatataaagttaattcctttttcagatatataatgagaaaagtaactccccaatacactccctaaaaggatgctgcttcccatgtaaattattaatgctttatttagaagaccactcttacgataagcccaaacaccgccaagtgtcgcaaagaaaacttgaatagcccctatccctgaaacttcatgggcagttaatgacatcactctcactaaagagggaatatacaacagcattggataattaataactgctccgccaataccaatcattccggaaataaaggcaccaataaaccctataatgaaaagagttgtgataaaggcaatatccactttggtttcctcctatcaaaggaaaagggtatctttctattcgataccctttcacattcattagcctttttgaatccaaaatttcaatacatcgccctcgtccgtttgctctaaaaggtcatgtccgcctgatttagaccaggctgcaagatcatttttagctcccttatctgttgcatgcacttctaatatttgacctgattccagttcattcatcgctttttttgtcctgacgattggcattgggcatgccaggccttttgcgtctaatactttatctgatttcatgttcatctctcctcttattaatagaaacttgtgttaccgtattgcacagcggtttgggccaatctccatttcacgctgtttttcttcatctgggctgattttccccatgtttgtttctcgaatctcttggtatgcatttggttgcggaggcaaatgatctgttactaggtgtctaaattctgtttcatccgcaatgttcaaaccatggttctcgctaaataatgtacttagttttttaccaacacttccatcctcatttagctcgtcaatgatcataaagtgtgccggtaatacaattaaatcctttgataacgctttgtaacggctataaagcgtttttcttaaatctcctacccaatcttctgccataccggctaagtctggtctgccgattgaatcaataaacaaaatatcacctgaaagaagatacagatcatcgacaatgaaagaagtggacccaatcgtgtgtcccggagaataaatcggttgaattttaatcgttgtatttccaatgatcatgtcgtttccttcttccaacggctgataatcgaataccacttcttcagcatctttaggcggtaaccagtaggttgcttttgttttttcagcaatgactctgccgcctgaaatatggtccgcgtgaagatgtgtatcaaatacgtgagtaatcgttgcacccttctccttcgcaaaatccataaagaaatctaccatacgtgtcgcatcaataattgctgcttcaccattggaaatgaccatgtatgacaggcagcctttaccgattcgaacaaactgatacatctcaccgccatcttttaaatccccgacttttaccggctctaaatgttcgctccatgctttcattccacccttaagataggatacagaatgacctgcttcagatagcatttcggataccatgacggatgaaccttcttttgcacaaacgaccagcacttctttatcagaaggaattttctccaatatatcttctacgccatctaaaagatcaaaataaggaacattcaaatggtcaaagtcatgcccttctatcttccaatcattaaaatcattttcattacgcacatccaaaataaataaaggttctttgttatagattttttttgtcacttcttttggggtcattgcctttacggtcatgtttcaatacctcctatatcaaatcttttagcggaactaaaacgttaaggatacatcagcatctttaacaaaattctaaaaaggtaacagccccgcctacttcgattccttgtataaattcatcttttgttaaacccataacgtccatcgttatttgacaaccaattcatgcaactcccatttcaatcagttaagaatagaaggcacatttgcgttcctacaaccttctgcgacatgctcttttccttgtcgcaatattacagactttataagcatcaaacagaccgccatttgccgcaataatcgctactcttgtactcatctgttcatcatgctttttatttattcggttttacctgtccactcccgcataccggggacaacattaataacttttttaaaaccttgttttttcatggtgtgggccgccatttcacttcttcttcccgaatggcagataatataaatttcatcatttttgtttaattcattagagcgcttttccacttcaccaagagggatatgcacaactccaggaatatgagctttttcatactcctctatctctcgtacatctaaaatgttaagagactcgtcactatccactttctgtttgaaagcttctaatgaaatatcaggaattgaagatgcattttctgatgaatgctctcctccttttcgaagaaaatgacgaagtatttctccctctgcttcagtacctagatattcatggcctgtactttttgcccatgcttccagatctgctgtggaacctttatctgttgcttgaatttccaatacttcaccagcttttaaatccttcattctcttcttcgtttttacgataggcattggacacgccaaacctttagcgtctagtacaatagttgctttcatcattttttcctccttttttcatataggggtgggggtatataaatatacaaaaagtttctcactagaagttaataccatgtattcatgcccccttttatatttgtgatgtttttaaatccttgtttcttcaatatttttacttgcctttaaacttctcattccgcttagcaatgagtaaatgagtagcattagataaataagttgacactgccttcctcagcatctgccaaataagctgctacaccagcatagtcgatatcatctaatagttctttttcctgtaaaccaagaagatccattgtcatcgtacaagctacgagctttaccccctgttcttgagccatctcaatcaactgaggtaatgtaagtgcattatgctttttcatcacatttttaatcattttagggcccatacctgcaaagttcattttagataaacccatcttatcagcaccacgaggcatcatctttccaaacattttttcaagaaatccttttttcactggaatcagctcttctttacgtaaagcgtttaatccccaaaaagtatggaagatcgtcacttcatgatcgtaggcagctgcaccatttgcaataatataggctgccattgccttatcataatccccgctaaataaaacaattgttgtgcgttttgtttgttctgtcatgtttattcccccaactaattacccctgtgggtatattaaagtcaaaaaaattttttcgaaagatctgcttttattcaactctttaaataccatagggggtataatataacgcatataaaaattcgtcaaccttaggttgatgaatttttatcggctctttaccaataagtcaactgcttcttttactaaattttgtgtgtcttcgcctttttctaaactttcacgaacacaatgttcaaggtttgtgctcacaattaaacccatcgctcgatcgatcgcattacgggaagctgctaattgggtcacaacctctctacaatcttttccttgttccatcatagtcaatacacctttaatttgtccttcaatccgtcgtaagcggtttttaatcttttgatcatactccatatatcaatgaaatcctttctttcatttatttttacatttacatgctgccagttcataactgtttacatggatacctttgcgctttagaaaacgcactcctaaatttaattccacccgatcacgagctattatgtgtattttatcacgtggaatctctaaataaaaacgttttagatacgcatatgggatgtttaaaataatattatccgaaaaattggctacatcgttataatgacgaatatctaatattgtgatgtccatagcctctaatttatctttatggatacaagagattccggttataggataataccgtctatacgatgcaatgataatcacaaaaataagcaggaatgcaataactaaataattgatactacttacaccaccttattaactctttgttattcacaaaactataatatacccccataggtatatagtcaagtgtgaaagttactttctttgagctgatagattcatttcaatatccgcggattgaaaaaatacttacatttcgataatgccaattctgctaaaagtaactcgaataaagaaataagccgattttattttaaatcgactttattttatcaattacttttaaaattagcacaagactgcttggatattacattgggtttcatttgcataaaaacaattcttaggtactggttccccatgtttcatgctggatgtgactccaattactcagaaatctgcgaataactatgctaatcttccgcagccactgcatctgctttggttttatgaactgtaccaaatggatggttaggaggagcataaatggagtaaagttttaatggcgtattacctgtattaatcacgttatgccaagtgccggcaggtacaacaatggcagaatcatcataaacatttctttgaaagttcaaatgatctttgctctttcccattttgacaaccccacgcccctgctcaatccgtaagaactggtcaacgttaggatggatttccaacccaatgtcttctccaataccaagactcatcaaagtaacttgaaaatgctttcctgtccataaagcagtacggaacgtattgttttgttttgtggctctattgatatttacaacaaatggttttggtccataatcctttaaaagaagatttctatcttcatatgaagagcgcaaatcggcacctctgtgtacgttctccatctcatttggaatagtccaataaacagatcttccatcattatacatcggtacagtcacataataataacattgaggcgaaaaagggttatagtacattttttgatccccacaattataaatttttgtgatagtatcctatgcatttattaagggagtgtgctaaatcaagaaaaatcatattaaacacaaaaatgaatgttcgatcaccgtttgattcacggatgaataatttatcaccgaccttgtaatcgttttctggatgttgaatttcactagcctttgttaacaagacatcgaatgacacttttatatcatggattatcaaaggtcgacgatcctaaatggcttttgaacatttacatagcacaacaacagagtatacggaattctgttgtttgtcccccctatcccagctcttttagatttatccctttggatgcgccttgatggccagcttttcagcagcgtagtatttagcgcctcctgaatcgttatagcatatttcaacgccgataaacttgcggttcccagtgccgtttgtaccgtcacctgtatgtgggctcgtttttagtaaaccagtttatattctttttgggcacacaatagaagcaatttttcatatgaaaatttcgtaatcttacacctctttaacttgaaggaggatttttgcatatgtattttcatacccgtcaactaccatctcatccagcatatattcctcatatgcattttcccctatttgcattccattcttttcaatgaactcaatgattctccggtacgcctcttcagtatttccgcctatttcatatccaactgcatacaggccttttggccgtacatgataatttatgttctctcccccattttttacttttatataaaagtaactgtaattgtagaagtctttttctaagatttgttcccgtgcaaagattccgcctatcggatatccttcatctaattcatattgctgaacttcatgaatgagttctgaaatggctgccacatattttcgttccggtaagtttaatgtttttcggcttaacatgaatgtttcttcatttaaatattcaaaagaaattgaggaaaaatcagtctcaagtgcttgttctgtaagcgtcacttttgtttgtaagatcgtttgcaactgcttaagctcatttatttttttatcaatctcaatagacttttcttttagaacatgcaggatcttgtctggtgtttttccttttattagacactttatttcttttaatggaaccccaagctctttaaatagactgatgacttgaaaaatctcaaattgatgataggaataatatctatacccattttctttttttatttccggcgagaaaagaccaatctcatcataatgaaataaggtttgtttttttacacggcagagcttcgaaaactcccctgttgtgaaatacttcttaacatcttcgctcataaaaacctccttgactatacggtaaccatataccttatgatttgattgtacttgaaaaaagcttcaagcgaaaaggataggtaaaaagggttcaattgagtaaaaggggaattcagatgaaaaaatcaataaatgagcaaaaaacgatattcattatactattaagcaacatcttcgtagcatttcttggtatcggtttaatcattccagtaatgccttcttttatgaaaatcatgcatttatccggcagcacaatgggttatcttgttgcggcttttgccatttctcagttaattacttcaccttttgcaggtaggtgggttgaccgtttcgggagaaaaaaaatgattattctcgggttgcttatattcagtttatctgagttgattttcggattagggacccatgtttcaatattttatttctcgaggatattgggtggtgtaagtgcggcttttatcatgcccgcggtaacagcatatgtagctgatattacaaccctaaaggaaaggtcaaaggctatggggtatgtttctgctgcaattagcacaggctttattattgggcctggtgcgggaggatttattgccggctttggcatccgcatgccgtttttcttcgcctccgccatcgcgttaatagcagctgtcacttctgtttttatactaaaagagtcattgtcgatagaagaacgccatcaactctcatctcatacaaaggaatcaaatttcattaaagacttgaagagatccattcatcctgtctatttcattgcatttattatcgtctttgtaatggcttttggtttatcagcttatgaaacggtattcagcttgttttctgatcataaatttggcttcacaccaaaagatattgcagccattattacgattagctccattgttgcggtagttattcaagttttacttttcgggaaattggtcaacaaacttggagagaaaagaatgattcagctgtgcttaataaccggtgcgatcttggctttcgtgtctactgttatgtcaggatttttaactgttttgcttgtaacttgttttatttttctggcgttcgatttgctacgtccggccttaaccgctcatttatccaatatggccggtaaccagcagggtttcgtagcaggcatgaactccacatacaccagcctgggaaatatatttggacctgctctaggcggtatactatttgatcttaacattcattatcctttcctttttgcaggtttcgttatgattgtcggccttggtcttacaatggtttggaaagaaaaaaagaatgatgctgcagctttgaattaattcattttctataaagtcaagtcatttggatgcagggaatgcccctggttaggcacaataagaaaaggtacttaatttgataggctacatgttgcttgacgtgaatatagtttaagctgagttttagcaatatcaggataccgggataagaaaaaaggagaatgtagtatgagtataaaaataaaaggagtaactgatgataatcgtgctgcaattcttgatctacatgtcagccagaatcaattatcatatattgaatctacaaaaatatgtttagaggatgcaaacgaatgtcactattataaacctgtcgggctttactatgaaggagatctagtcggttttgcaatgtatggattgtttcccgagtatgatgaagataataaaaacggacgagtctggcttgaccgattttttattgacgaacgctatcagggaaaaggattagggaagaaaatgcttaaagccctcattcagcaccttgctgagctatataaatgcaaaagaatttatttaagtatatttgaaaataatattcatgctatacgcctttatcaaaggtttggttttcaatttaatggtgaactcgactttaatggtgagaaggtaatggtaaaagagctatagatatccaggcctccttttttgctgagaaacgtttgaacttcgataatgattacctacttaaactgcaagatcattgtttaaaaaagcctggatgaaaatttcatctcaggctttaagcatcttattagtcaaaatctcatgtgttttatccagatgttattcttttttccggacaatttctaaataattaatatgccggccaactgttttgtgcactttaaaaatatacccatcggcttctataacggacccaactgcagcgtctatttgttgagtcataaaccagccgcctattgtatccacttcgtcacttgctaacgtcgttcccaataaatcatttacatcttcaatgagcactttcgaatctaagatatagtgattatcatttacttttctaatattaggcacttcatctttatcaaattcatctctgatttccccgacaatttcttcaagaatatcttcagcagtgactaaacctgaagtgccgccatattcatccacaagaatagcgatatgtgttcgctctttttgcatttttaccaataaatcatgaattggaacggattcaataacatggataacagggttgatatgattttctaacttgaaatcctcttttatcttctggtctgtgtcaatataagctgacaaaaattctttagcattgataaaaccaatgattgaatctttatctccatttaggactgggtaccttgtatagctctctgtcttaatggtcttaacaatagtttcataagaatcctcactagaaatcgctacgatctctcttctcggaatcataatttctttggcgattctttcatcaaattcaaaaatattatttacatatttcaactcattttgattgatttcaccgctcttatagctttcagacagtaagatgcgcagttcttcttcagaatgagcaagttcatgttctgatgcaggtttcaaaccgaagagtcctactataaaccgggctgaaccatttaaaaaccatataaaagggaacaggatgcggtaaaaccaaataattggctttgcagtcaaaagagtgatggtttccgctttttggatagcgagtgttttaggagcaagttctccaactacaacgtgcaaaaaagtcgccatcacaaaagcaatcactaagatcaatacatgtgagactgtttcacttacatgaaaatgagcaaataaggggtgcaaaatcacttcaaaagtcgattctccaacccagccaattcccaacgctgtaaccgtgatccctaattgacaagctgacaaatattcgtccaaatgagtaatgacctttttggctgatacggcacctttttttccctctaatatgagttggtcaatttttgatgacctgatctttactatcgcaaattcagtcgcaacaaaaaatgctgttaagacaattaaaatagtaaagattataaggttaatggttgtcaatgatttgccttacctagtaaggcgtacacctccgatataaatatttatttttataacccgttttttctgaataaacaaaaaacagtatatataacattataagttcaaaagaacctaaaatcaactctgaatgatgtaaataatcatctttttccgtatggagagtggttcccgtagtattcaactagcgattggtgacgttttaaggcttaaaatagaaagcaaaataaaaacacacctgaattttctggtgtgttttaataatatccaaccgtcttgatttatttaatgtctttattaaggttttcttttaaaatttgaatcaattccgcctgttgctttatatttttgcggccatttctattaattgcagcaagttcacagacaattccagctgaaatgaaaaacaataaaccttcaaacattttaaatcccccaccatctaagtgatagtcaaatttgttttttctttttgtaatacctgcttataatcttccttacgctgatatatgttatttaaaatgagtccaataatgacaaacagtgttcctactatatcaaatgcagttatgttatatcctttgatcaccatgattaacaatgtagtaatggggacaaagttaataaataaaatcccattaatggatgataggattttaatgccatagttccaactaaggagggctatgatacctggtaaagtaatcataaataaaaaatcatacttaattgctgcaatcactttaatactcggtaccgacacgtaaccttgcgcggtaagtatagctgtcatgattcctgttatagctgtgccgaataaacatgtcaatgttgaataacgaagtgtggaccactctcggaatatctgtccccccattgtgtagacaacccaccctaaaacaccaatgaatataaagagtagcgagaatagatgatcccccaataaaaaaaagaaacttatattacctttggttatgaccatcgaagcccccaaaaaggcaatcaatatactgatcattgtgtattttttaggtttcacatgtttatatccccatagaataacaattgaaagcattggcatgagtgcctcggcaatggatgctgtcataattccagacttccccatcaacctttgacctaaaaaaataagaacattgtatacagtaaacgccataaccccaaataaaatgatccattttgctttaccctctaaatgaaatgatttttttccttctcttaccaataataaaatcactaacataatcgttaccacaccgtagcgaataaatgaaaaataaaacggatcaataacttctaatgcatgatctgcaactggaaacatcgcgccccaagacatacttgctactaaacatgtaagggcaccaatgaataattgactttttttcattgaattcccctccttttctttaaaattacaatgagaattataaaaagaagtaagcatcaagtaaaatgaacaaaagtgatgaaaaacatcattgataatgatactttaatgaagggggatcttcatggaactgcgagacttacaaattttcaaatgcgtagcccatcacaagagtattaccggtgctgcaaaagagttaaattatgtacaatctaatgtaactgcgcggattaagcaattagagaatgaactcaaaacacctcttttcaatcgtcataaaaaaggggtttcactaagcccagagggccgaaaaatgattgaatacgttaacaaaattttgaaagatgttgaagaactggagcaagtctttctagatactgatataccttctggaatattaaaaatcggtacagtggaaacagtgaggatactgccgaccattatagcttcctattataaaaagtatcctaatgtggatttatcattgcaggctggtctaacagaggaacttattaaaaaggtcatgaatcacgaattagacggagcttttatttcaggccctttgaaacattctatcctggaacagtatgatgtttatactgaaaaacttactcttgtaaccagtaacaaaacgtttaatatagaggatttttcaacgactccgattcttgtttttaatcaggggtgcgggtatcggtctaggcttgaacagtggctcaaagatgaaggtgtgctcccaaacagaatgatggaatttaacatcctggagacaatcttaaatagtgttgcacttggactcggtataacagtggtaccggaatctgctattatgcatcttgctgcacaaggtaaggtttattgtcacccattacctgagaaagacagctgtatctcaacaatctttatacgccataaagatgcgtacctgacaaattcaatgcgcagcctccttaagaccattgttgaacataaaaatatgagtatgtcttaaagtgctttttctctttctatgttaacttcttaaataaaagagaaagcgcatctccacttcgctacccttattcacgcaaaaaatagagcagtaaacatgtgagttactgctctgcttcgtttatccaccgttcatttgttttacaatgtattcagcatcatttcctacaccttgaagcaacgctgaacctcgcttatgctgccaaggcaaccctataaagtacaatccttctacaggtgaaacacctctatgatgtatgattcgaccttctttatccaaaacaccttttatatttatccaacataagggattcctgaaaccagtagcccaaataatattgtttacttctaatgtagatgaatctttaaaaatgatttcattttgctttgcggcaatgactcttttttttaagatgatctccttctgttttattgcatgttttaattcatgcccaaatactggatcacctttcttttgaatgaatttgcctactattgatgtatgacttgcatgtaaaactcctagtttatcaaaccaccaaaagatgcttctttttcctatcattaaagggaaataaacaagtttattactacaagctaaatatgtaactctttctttggataattcaacagctatttgagcaccactattcccaccaccaactactagtacatttccatatgccaattgttttgaattcttatattgtgatgagtgtagttgattaatattatcggataaatcctttgatattgatggaatattaggggtatgaaaaggccctgtagcaatgacaagattcttcgtttgatattcttcccgatttgtttttattaagaaataattctttatttttaggacacttattacttctgtccgtaattggattggaatttcaaattttttaacatacttctttagataagcaacaatttcattttttgaaggaaatccatgtttttctccttcaagatgcattccaggcaaagagctatacattcgagaagtaaataaaactaatgagtcataccgatctttccagctctcccccaccccatgacttttatccaaaataataaacttttgatcggactgctttagataataccctatcgagatccctgcttgaccagccccgattactatagtgtcgtacacattatcaccccgccaatttcaaattgtcagtagacagaatttgcaaaatgctagttgatctcctcactataaagttagataaaaaatttaatggtgatggtggttacgcggcttctccattttaggctgacaaaggatcgcattgtcgtgattatgcgcttcggtttccatttgaatggttacgtgcgtaatgcctttatgctcaagttcatgttcaattttgcgtaaaatattttcactttctgaaatggtcagttgatcgtccacaactgcatggcaagaaagagcattcaatccgcttgtgatagaccatatgtgtaaatcatgaatgttttgaattccctctgtcccttcaattgtacgaatgatatcagagacatcgatattttctggagttccttccattaagatgtgaatggaatctttagtcacattgtaaccgcttcttagaacaagaatagccacaatgatactagccaatggatctgcccagccccatccaaagaagatgataagtatggcagctaaaatggcacctacagagccgagcatatcgcttattacatgtaaataagctcctcttatattcagattattctttgtatctccgccactcatcataatccaagcgaccaatagattcacaactaacccgatgatactaattgtaagcatgccggttgctgctacttttggtggattagagaagcgttcgattgcttcataaatgatataaagagaaataagaattaaggcagcaccgtttatcacagctgcaagaatctcaaatcgtttatagccgaatgtcttattgtgatttgcctttttttcagctaatgtaaaagcaatcagggcaaccattaatgaaattgaatcactcagcatatggcctgcatcagataaaagcgccagactatttgttaaaaatccacctatagcttctattatcatataacctgtaatcatgataaaagagatcaataaaacctttttatttgctccttcattatgattgtgacccataaaaaactcctccttaactaaagtttttaatacatatgtatttattatttcaaatctgttatgaagcattctaacatgatgcaaataatatttatatatgagcatgtgttcatatataaatatatctgctctttactgaaatgtcaaaatattttttatagaaatcaacaatacctccttaattattctcttattaacataaaaaagcggaacaaacacatggtttgctccgctaacctagtttctctatccttttcttgtagtatgcaactacaatttacctgttaaaaattaggcctcaccaagtccaaaactccagtcagcattatcattttcaacaatagatacaattaaatcagttgatgcgataccacactcagattccagtctttcggctaacagcctgtagaatttttgtttcttctcttccggtcgggatttacttgtaacagaaagaacaacaagatttttggttcggttaaatcctaagcctgtatcctcaataatcatatgattttctggatgttcatgcacaatttgataacggtcctgttgaggcacatcaaaagcctctactacaacattgtgagcgacatctaaaagttttttcaaacttgattgatctcgcccttctattaagtcaaaacgaagtaatgacataaaatcccctctttctactgtcagatatttctaatcatctgctacataatgtgctcatttttattcttactacattagaataaaataatttcccaataaccccttcattctgttgttagtcaagcctatgttatgatgtgtatttccataggcaatatacagaatcaacttcgagtaattaaccattttttgaaatagccttatcacttactctagaaatcatttattcttctaagctttagtttacatgaagctctgctatcatatataattcaaaattaagatggaagacatctcaaaatcagatatcaattatggaggactgcatgaatattcagttgttacaggtttttctcactactgctcgtgaaggcagtatttccaaggctgctcagactttaaattatgcacaatcgaatgtaacgaataagatacaacaactagaaaacgatttacagacaaaattattctatcgccatagtcgaggaatcacacttactcccccagggcaaattcttgtttcttactcagagaaaattctacatactattgaagaagctagagcagccatgggcgaatcatccgcgccttctgggccactgcgtataggatcaatggaaacaacagctgcagtttggcttcctcaactccttgcacattataataacctctatccaaatgttgatttgaacctagtaaccggtcctacggaacaacaaatacaagcagttttacattatgagttaaacggcgcttttatttcagggcctattgaacaccctgatttagttcaagaaaaggtattggatgaagagatggttcttgttacaagtgcttcacaccctgtgatttcttccattcaggatgttcaaacacaaacaatgcttgtattccgtaaaggatgctcttacagagcaaagctcaatcatatcctccaagaagaaggtttattacctataaaattaatggaatttggcatacttgaagcgatcattggctgtgtaagcgccggcttggggatttcactgctgcctctttcaatcattgcttcgcatgaaaaagaaggccgcatccgcagccacactatctctgacaaatattctttcgtatcaactatgtttataaggcggaaagacactttaattacccctgctttatctgcttttttaacgcatatgagggatcattttcagataaagaggccagatcaatcgtaaataaatggatggaaggcatgcttcgcctcaaaatacccctgatcagttgtctgatataaaaatataggcgcatctcaatgtttgtatagagcaaaaaagcaaacttcggtatgtagtttgctttttcttcgtgattttgcactcagaatcgtgaaacctagtcgatattaggatgtagattttcctcattcaaagaattttgaacgaaggtcattgccctagacacttggttgcgtcttgaagttaaaggctgactatttcctaaagcgtcaatcgctctcacaactattaaatattcacctacagatttcgggtgacaacgggaagattgatattttcggttggacaggggcagaacatccaattgtaacagttgaagtatccactgatggaggagatcctgcagatctgagtgatattgctgttaattgatcaacttgtttttgttcggaatatactcagtatatagccgcatattcctcctgcaatagctggaatgagccaccccagccctatgttatacatagggagaatctgagagaaaatatgattcacaacttcaatttttattcccgcctccttcaaaccgtcaaataagctgatgatgaatgcgaataataaactgccttgatacacttctgtcttccctttaaatacagaatgcaaaaacgttaaaaatattaaggaaatcgcgataggatacattgtcagtaagacaggcattgacaccttaatgagctgggttaatcctatatttgcgacaagcgtactaaacactgataaaacgacagcaatttttttataagaaatgttcggaaatagttcatgaaaaaatgaagaacacgcagtgatcagtccgacacttgtcgtcagacacgccactgtaatcattaagcccaataagattgaaccataagaaccaaaataataggatgaaaccttagccaaaacctctgctccattttctaaaatccccagttcttcaacgctggaagcccccatataggaaagggctgtatacataactgctaagagtacagctgcaatcgcggctgcttttgcacaaacacccatcagctgttttttggtagaagctccttgttctttcaatgcattcacgatgataattccaaaaacaaatgctacaagggcatccagagtgaggtatccttcctgaaatcctttaaaaaacgcttgtgatgtgtacccttttgatggtgcttgaatggttccaattgggcgaataagagctaccactacaagcaatccgataaatgtcagcttaattggcgtcaaaaatttcccaactatatcaatgatttttgaaggattgagtgataacaagcatgccaatgcgaaaaataatattgtaaataagattaatgagacagggcctgcatcatttgataaaaaaggttttaccccaatttcaaacgatacgtttcctgatcttgggatagcgaaaaaaggcccgattgccaaatagagaatcgtcgtaaatacaatgccaaacaccgggtgaacacggctggctaacgactgtaagttttgtttacccgaaaaaacaaatgctgttatagccagtaacggcaatccaactccggtcactaagaaacctgcattagcgacccatacatttttcccagccatttgaccaagcataggcggaaaaatgaggtttcctgctccaaaaaacaatgcaaatagcattaatcctataatgatgatataggaagcagacactttttttgacattatatatcctccgattaaagtagacacttcttgaatagccaggaaacattacagatgctatttgcactggcgcagtgttgattccaaaataagtttgtgtcagttttatatatttttatcaagttcaacaaaagcatgatcattttgatcgtttccgatatcggttaaaaaaccaattgcaccaaaaccatataaacaacggttccccccgctatggaaagaagcatatttttcttccacaagtgaagcagtacaactgcagctgctccaaccaattcaggaatgccatgactttcagaaagcagactcacatcttttaaacaataaatgaccaaaagcccgattaccgctgatggcagcactttaccaagatattgtacatatttcggtgtcggtttgccagacgggaaaatcatgaatggaaggaaccgtgtcagcattgttccaagcacgaccattgcaatggtgatcatttgctgcgtcatagtcatcgtcatacggaaacctcagctttctccaatggttttctcagaacagtcagtacccctaaaatggcgagcatagcaggaataataaattggtttccgccaaaaaggataagacaggctactgaaagtccaagtcctgagagagcactgtaatgctttttctctttcatccattgttctatgaatatcacaataaacagagcagtcatcacaaaatcaagcccttcggtattaaacttcacgtacgacccaaaaatacctcctatcgctgcccccgcgacccaatataaatgattaagcagtgtcacaaaaaacataaaccagcccttgtcaacattcgccggaacattagcggtataattgatagaaaatgattcatcgcacattccgaaaatcagataaagctttttctttccagtccccctgtacttatccaacatggaaattccataaaacaaatgccgggcattgaccattaatgtcaaaaaaagagcattcatagggttgaacgcaccaagtaaaaaattcgctgcaacaaactccattgagcccgcaaatatcataaaactcatgatgattggatagattgcgctaaatcccaaagaatgcataaagattccataagctatccccaaaaataaaaaccccgcaaaaatcggaattgtatatgggaatgcagaacgaaatgcagcccatatttgacttctcttattcatatgagtgtttatagcaggagagcttaaatgtaacgattctttatttttattcaaatcaacaacctcctacatttcatcaattggcacacttacagttcttttttctgtactcatgactatgcttgtgtcaactccactaatagcagggttctgcattaatgaatcaatgataaaattccgataactctccatgtccttcgccacaatcttaagcatatagtcatggcttcctgtaagtgtgtagcattcttgtacctgtgggaatttgtttatatcctctaaaaatgaatgaattgtctccctatttaagggtgataagttgatgagagctagtgctgtgacttcgattccaagttttttctcatcaacaatagtcgtaaactttttaattatacctgcttctactaggttctttgttcttgcaaggcaagctgatggtgaaagcccaattttcttagataaattcagatttgatattgaagcatcttcctgcaattctcttaagatggccttatcagtttcgtcaagcataatacccatttcataacccccaatacgacttaacagaattacatttcatccgatttaaacaataacgaattttcattcgataatcaaatattttttaaatttaattccttttaaaatattattcacagaataaaattatccccatgattacctcataattaaattaacttacatcagaaagaagtcatgggagagttatgtacttgtgtgacttgataccaacatcataagaaacttatcagaagccaaaaagttattgcggtctcaccgaaaattgaatttgcggtgccctattgcctttttctgcgaacaaaaattgttaaaattcacaaaacagaaagtctactctattattattttaaattcgtcctctagttcctcttgagcctcttgtaaaacttctaatacatcatctgcgtatgaacctaaaaatgtattgctgaactcaaaatttttcaagactaaagtgagcggcaaatccacccaccctgtcaggcaatcccataaagcgtctaaatttctcccatagtagtctgggaagtctagtttatcttttaaaacatcatgtaaaacttctatattttcaaagtctcttccatctatcattatttttctcattagaaactatgccctccattattttatcttaacaaacgttttctttgtaacagctgtttgtccaaatgaggctgaaaacaaataaaaaacaccgatagggggaaactattggtgtttacaagacattttcatgcccggtaggcataaataatgctaaactttgtttttgaaaagctatcatatcaaatttttatgttacagcttttactatcgtttaatctaattgaggagtaaaacgaaatatgtttgaaaatcacatatccccaaaaaattaaaaactaagcggcagttcttcgattgctctcatcagaaaattccctttccatttcatttgttccttttcgccttttaactgtatatttggacagcggcgtaataaggtggaaatcgcaatcttggcttctaagcgggctaactgtgcaccaaggcaaaaatgattgccatggccaaaagcaatatggcggttgttctttctttcaatatcaaatatgtcggcatttggaaatatcttctcatcacggtttgctgatgctaaagaaatgatgatcacatctttccgtttaatctcctgcccatgcagtataaacggttcagccgtccagcgaattgtcgttagctcaactgggctgtgaaaccgcaatgcttcttctatggctgaattcatcaagtctggctgctggcggagcttttcaaattgatcaccgtgacacatcagagcatatgtcatattggtgattaagtttacggttgtttcatgacctgcaacgataagcagcataatcatcgagtacaattcttctgtacttaattgtgtgccttcactttccgcttgaattaatgcactgattaaatctcctgcaggttctctcctttttttgcgaactaaggattccagatattcaacaaactcccctaacaagtggtcattctcctgaagtctttcaggggcatctgaaaaatcaataattacttgcgaccacactctgaatttttgacgatcttccaagggaatgccgagcatttcacttatcacgataatcggcaatggaaacgcataatcgtctactaggttcatgaatttgttgggctgcactttatccaataaagaatctgcgatatgctggattttgtcttccaactgcaaaatcatccgatgcgtaaatgctttttgaacaagagttcgcaagcgattgtgatccgggggatctgaattaagcatatgttttgttaaagactcttcattcttcaatagagcaggacgtttttcttttgcggtaaatacattttcatagtttttctttaatttttcattctttaataaatgtattgcatcatcatatctcgatatgagccagcctttccccagagatcctaaagataatgggtagagaggctgtgattttcgcaattctttataaaattcatacgcttcatctttaaatgctctcgaagacaattgactttccgtcaagatggttacactctttttttcttttgaagacattcattcgacctccatctttatgaaaggttatgttaatctttaaatatataatcagtacgatttgtaaaatgatctattgagatcagtattcatgctaagggccaaaatgccgcccccgcattttgaaataaaaggtatgagacagtcattaatcattttgctgcccaaactctttccctgataagatggcgaaactcctaatacttctaaataccatgccggctcttttaagtatttggaatattttccaacttcattagtcacagtcactgtcaacatgttcaatactgaaaatcctcccattttgattaatgttatcccccctgctgctatataatcgatcaagttaatgtcgggtttatcacgatgttttaatagagcggcaacaaccatttcaccattactgaatgtcaacaaaaaagaaatgctttttaaaatatgctcttgtcagtactttatgcatttcaaaaataaatgaatgatctttttttcgcgttttacgagtaaatccataaaaggatattgattgaaagattcatggagtagctttgccacttagcttattcatctgccctagcttgtcgataaagaaacattgatacatctcctctgagcaagtaaagaaggaaatcgaattaaagcgcccttcctattggaaaggcgcctgccgttttactgtgccaaaatgtttttcatcagtgagtttttataaaatcatttattaattgatcagttgtcaatattgtggcaaattcatcatgcaatgtagctagagatatattatgaatagtcgccgcatcataatatgtatcattttggtctctcattccgaaggctgctgttgcatctgaaatcaggtatgtatcaaaccctaaattaccactcattcttgtggtggttgatacacagtgaggcgtggttaaaccagttatgactacagtgtttatttcatttaattttaagaattcttctaaattcgtaccaataaagctgctatttactgtcttggttataatgacttcttcatccataggcttaactatttcctttatcgcaaacccttcattctttggatggaataaagaatgaggtttatcagaagtgtgttgtatgtatatgactgtccatcctttttctctccataattttagtattttactaatattttcttccgcctttacgttattccgttccccccattttttatcatcgaaggctttttgtacatccacaatgattaaagcttttttcttttcttccacaagataccctcctacgtagaatttctatttattactacattctaaatacaaattttacttttgtacaattgtttaatgatgaatttcgaatgagcgccttctttattgaaaaatgcgttctaaactgcaactgtgcccaagccgttaaccttcaataatctaatctgagaatcactggctctacagagaatgataaaaagcactctaataacgagtgccgaaatgaaaaactattgatttagaagccatttgatacgctcagctgaaaagatgtagtggagtattattagacataaaaagacaataccaactggttttaaatgactaaaataaagcgctgcaacagccagtgcaaagatcaataattcaataactagccttgttaccccgtttacagctattacagtttgtccacttcgactaggatcattaggtactgcaaatacagaccagacaatcataactgcaataggtaaaacccaagttaaaacatatttaaaataaccattaaagcttatccaagcaaacacccctaaggagattagtgcagccatttcaagggtgaatcttaaaagtaaattagtctgattcagtttttccaactcctctataaaaaacacccccgcaggagatgctctttctctgctttatttcagcgtataaaaacttttctgttcttcctatttagattctattgtagttttcggcgagattacctctacttttgaaaagatgataccgactgctgctgttaccaatgctccgataatagaacgatgataagtataatgaaatatgacaacttttcccctcctatccagttaattatccaaataatcaggaagttgtctacaatttgcagaatttgtcgaacgaagtaaagaatataccataaaagctgaatattgacctcgcttatcgctgggaggctttactcattgtatgaattacagtaatacactaccttcccttttgagaagacgttcctctcttatatccatttgttgcaacttagctagactcttccaataggcttccttttggcgcagctgcttctagtcgaaattgagcaacacctgaatgtttcattggaatttctgaaccatagatcgttgctgaatttgttgcaaatgcatacataggagtagtcgaatggtggttgaaaaatgaaatgaattacccacctccagtgatggcagaaaaagcgggggttttgttagagaggaatctatagacatgtgtatctagaagatttgacagcattaaaatttatacttacatcgttgggaacaggccaacaataaagcggaagaacgtagtcatttgaagtggtttggaataaaaatgattcgaatatgttcttatcattgataaacgaacaaaaaaagaacatgttttgaaaaaagattgatcaaaacatcttcttatatgttgtcatagcgtaactttttataaaaaggttgattacattttcggggcttccaaaccaaattttgcccattcttcttttgctggaccataaatacctgaaacagttaaacctgcttgtctcataagaacagtcatttgtccccgatggtggttttgatgttgaattaaaaacatcaaaagtgaaccgttaggcaattgttgtccaataaagttgatacgttcttgaagtgtatggtcagtccattgggtttttaatgcctgtacaaatgcattactggcttgatgatagctgtcagctataaactgagccgaagttggaacaggataatcttcagctggggcatggaacgttaagtctgtgtttgaggtaatgatgcgaatagcagcaacagtgtgccaggcaatacggcctagagtccaattttgtgaagttatttcttgattaagtgattcatcagtcagactatttaatagtttctgtgtagcatctgcttcgaactcccaagatttcaaaaaatggtctaaggtttgaaacacaaaaatcctcctttttattcttttgttttttcaatgtgcctataggttaattataatgcctcgtttcgttaaaaagaacaaaaattttggacaagaataatcatagtaaaatgcgtagaccttcttaaacataacgatttacgcatctttttacaaacatggtgactccttggtctccattgtcagcgagaatcaaatatcatatgaaaacaatcctatattcttattactttactgagcaataaatctcttcggtatacttagtgatgccttcatcgtaatcaggatactgatatgtaagactttctgatacagcttttgaatactttctaaataatgcatagcaagtaaataaagacttccacatttcctgatacccattcacagaatatgtagacatgagttcctcccattctttatttgaaaggtaccgtttcataaatttatagttcttccccatactaaatgaataccctttctgagatgcgatatgccaggccatcattctcaataaattaggacgtacaatttcatttaaatggtcaatggcaaaaaggatttcatttcttgctagtccttttactacgtaagtcgaaaccatccagaactcattacagcaatcatcaaattcccttgcagtcggctttttcatccagtattggcgatcatttggggtcactttatagttgatgaacgaatccttatcgagcaagaccttaaccaaaccatcgttattagcaaaataatcttctgcttcacgaattggaataagggttagatctaatttgttcccatcctcaaaaagaatgatgtatgaaaaccaattacctaattcgggaggaaaaagctccatatcttctggtttttgcatcataatgcgcttcccaaagatttcgagccactgatcattttctttaaaagaatctacatcagttacaaaatacgagatgtcataatcttggaagttgtcaggagggatatttctgtttgtacgtgacccttccaaagtgaccaatcggattctctcatcgttcaaagcaaagtccaaaaaaatgtccatcatttcctgctcacttcgcattacatgttcctccgtttcagccttaatatctaactgtaaaaccgaatattgatctgtacgtcttatagatttttttactcttgaatgtgatgtattcttctaagctttattttacatgatgttctcctatatattattcaatattaagatgcaagacatctcaaaatcagatatcaactatgacggactacatgaatattcagttttttgtagagccgccatgggacgacactatctttgacacactttaatcccccctgctttatcgacatgttaactggtatgagagattgacaaaaagaaggaaaacgatatatttaagcgaatacgagtttttgagtaaattttaaaatgacacttttttcaaaaatcatgtcttaacggggggattcggtatgaatgaatttatgaagaagttttccttaacaaaaccgattattcaagctccaatggctggcggtattacaaagccccgacttgcatctgcagtttcgaatcaaggtgctcttggcagcttagcatcggggtatcttacgccagacctgctagaacaacagataaaagaaatgtttgagctgacagacgctccttttcaaattaatgtgtttgttccgcttggtctagaaatgccaccaaaagatcagattaaaaagtggaaagaaaacataccgttagctaatcaagtaaatcaattcacatctgtacaagaagagtgggatgacttctatcaaaaaattgatctaattttaaaatacaaggttaaggcttgctcattcacttttgatctgccgcctgaagacgcagtaaaggagctaaaaaccgctggatgctgtttaataggaaccgcttcaacagtagaagaagcattgttaatggaagaacggggaatggatatagtagtccttcaaggaagtgaagccggtggacatcgcggagcatttttaccttccaaaggtgaatctgccgtaggtttaatggctctgattccacaagcagcagatgcactgagcgtacctgtcatagctgctgggggaataatagaccacagaggagtaaaagcagctttaaccctcggagcccaaggcgttcaaatcggttctgcctttttaatttgtcacgagagtaacgcacatccagtgcataaacagaaaatactagaagcaaacgaagcagatacaaagcttacgacattattttcaggtaaagaggccagaggaatcgtaaataaatggatggaagaaaaagaacagtttgagacacaaacccttccgtacccttatcaaaatacactaacgaaggcaatgagacagaaggcttcacttcaaaataaccatgatcagatgtctttatgggcaggtcaagggatacggtcattgactgaggaaatttcggttaagcagcttttaaatcagctttgccaagaggatataaaaatataggcgcacctcattgatagagcaaaaagcaaacttcgacaggcagtttgcttttttttcgtaatttcatcccctgactttggaaatttaaatactcctacattttcaaagctaattgaatcgggttatcaatcatcccactgatacggtgcgatcttgatgatttcaccacaatacatcaccaacatttcgatcttatctccccttctccagttttgctccctattcgaaaaatcgatagctcccatattaaattcgaatagtaaaatggttctttttcgtttgattcagatgatataaagtcatatgataaaaaaagaatgagacagaaagcgtgagaagtgatgaaaataggattttttgattcaggaattggtggcatgactgtattgtatgaggccataaaagttcttccttatgaagattacattttttatgcagatacgttaaacgttccatacggtgaaaaatcaaagattaaagttaaagaatatattttcaatgcagctgaatttctggccagtcaaaatatcaaagctctggttattgcgtgtaatacagctactagcattgcgatagaggatcttcggagaaacttcgactttccgataatcggaatcgaacccgctgtaaagcctgctataaataaatgtacagaggaaagaaaaagagttctggtagttgctactaatttgacgcttaaagaagagaaatttcataatctagttaaagaaattgatcaccatgaccttgttgattgcttagctcttccaggactagttgaatttgctgagaactttgattttagtgaagacaaaatcattaaatatctaaagaacgaactatcttcttttgatctgaaacaatatggaacgattgtgttaggatgcactcattttccgtttttcaaaaacagttttgaaaaactgtttgggataaaagttgatatgatttcaggcagtgtcggtactgcaaaacagttgaaaaaagttcttgcagatcgtaatcagcttggtaaaggctcgggctcaatcacctttttcaattctggccataaaattgtagaccaagaagtcatatcaaagtacaaaagattgtttgaaatattagatgaaaatcaaaggagtcatgttggacattgaatgtaaggggctctggttataaacaatttttcagtaaattcacaaaagagagaagtatgaattcgggtttgttatccaatgtaaatgaaaaagacagtctcatgaagaaaaacatgaactaagaagcgggcttaaaaagcccactttttttctaacaaacaattgagttatgcacaaatatctgattacagtgttttcgctctttcccctcttatttctaccccatctctatagcttttctatttcaataaaacacaagtctcgattgaaaagttatcgtaacatttacacttcacaggacatttttcgagattagaaatcgaccgtttgccagatacacaaagtcataatgtgtaaattctgtgtctatttgcatgtttattatggaattattttcataatgttttataatacaagatgatagcgttttctaattataatgatagggggaaataatgatgatgaaaaaaggactgctcgcgggtgcgcttacggcaactgtgctttttggcacatgtgcagtagatgtgccgggtattattagtccaaaaaccgcagaagctgcatcacagctaactgatggaatcggcggaagggcttacttgaacagcactggtgccatttttgttacgaaaatccagcttcctagctccattcaggtttcaaatgggacagcctacatctactctggctttagcgggggcacagaatccgatatcgggcttcagtacagtgataaatataatgtatggaaaccatatatgaaagtcggttcaaaaggacaggatcaggttcagtacctcgaaggaggaagccaattcacgaatacgaaaggcttccgtcccggcagcaccgtacaacttaccatctacaaaaaccttaacggcaatacacgcgctacatactggggcacaaacaatgcgggatacaacggccgtctcatttcagagatcagcaaaacaaatgtcggctccatctccaaatggaaagcgctcgctacagttgcaacaacaggttcacgccaatctatcaaatcaaacttttcaacatcttttacaaacatcaccatcgacaacaaagcaataacacctgtaattgatacacaagacttcgctaaagtaacagtctcaggcaacagtgtcagtttatccgttgtgaaaaattaaaacatgttaaacatacaatgcgttaggctattgagaagctctcgatagtcttaaagggggcttaacatgccccttttttcatttcaatttaactttcagttagcttcggtgcatgccgtctatccccgtcttttatctgggtgaagtaaggagcagctcgccccttctgagcctgttccatttgctcaacgcaaaaggtgtgcattactgtcttaaaaatgttaaaacaaatggcagatggtgcactttatttttagatgaggcatgcttacgctcgatatgcaagtcaaatgattaagggtctgcaagagagagaagttttgggtgtactttcataaaagagggatgtcttcatatagctcgattgcaccaggaacattaaccagcgattggccgagaacaacacatcactttgaaacggattcattccaaaataataagtatgatcaataactaataaagatcagttagcagtccagccttaaaaatatttttacatcaagtaaactagcatcactatcgaataagctcgatctgcatatcatgtactatcctcttttaaggaaggtgatgttatgaggtcatttccattaattgtagttctattcatcctattaatcatcgttgggacatctttctttggtggctattaagaacacaccttacctcatatccatcagacgccataagaaatctttatggtgtctgttttttattagatttaaacaaaaccattaaagtggggccatgcaaacacacctatggagattactgccacgacttctttgtgagggaaatattcttccctttatggactattgtcgatcaaaagagaaagttgaaatacctttttatggtgagatgaatcgaggcttagacatataaaaaaccgcaaagctttcttgaagaagctttgcggtctttgggtctcttctttgcttcatataagccaatagatttcaagcgtaatccactgccatacatccaatgattttttattttgaaataggtttcttctactcttcctgtgagatgactcaaggtatgccacgtcacaataatgtggcggatcctgagtggtctcaatcagttttttccccattctatcaattctccacagaaaaaatggctatggcagaacaactttcatagagtaatcatcatttaatgagccatcatctcatgggcaatatcgtgtccatccatttttgacgggtagtaggtaggccaatttttgacttcatcaagtaaagcttcacggtcgtccccccaatagagatgataatgactagctttagtcgggtaaatactatgatcactaaactgaatatactgaggcagctcttctgcttttttagctagtttgaatatgtatcttacccctctattgcccgcatcataggtgagaatttcgtacccgtcatacgtatacttaccagaatattcttttccatttttgaagaacgttacagtatctttctggattacaatacggtcaacatctgtttgatagccttttttataatactctttatattcttcagctgtcttgccgccttcgtgttctgatttatatgaaaacacttcgtcaagagtaccatcttgcaggtatggatatacagattgccaatctccttcccaatcagaaagtaagcgatcctttacttggctgtttttaaaatagccttcatatattttttctgtttcttcatcatgcgcatgactatgatcgtgagaatgttcttgtgtatgactgtcagatgtttgctcttgcgttttggaagagtcttcttcaactgctgaggatgatgttgtttgattagactcacctgcagaagaaccggaagtctgacatcctgccaatacgagtaatgaaccaatcgttaatatgcctagccgctttgaaaataaaatgttcattccaacactcctttttattaaatcgaaaacattacgatttatattatacatacatctcttgcaaacatcaaagggaaaatgctcttcatgcggatggactattttaaaggaataactgactttgttcatcagttattcctttaaaatacgaaagtctacgatatttccatatcgatccgcttcaatattacagcacccctcaagcagctgttttaattttccccgtccgcgttgtacccttgattttgctcctgagtaagaaatgccgagcttttcactcaactctttctgtgataacccctgaaattcagttaactcgagcgcctctcgatacttttcaggcaaccgtttgatggtcgatcgaatacacacagttgcttccttggtgaaattttcttcctctgcacggttattaaaatgtagatcatcaggcaatatttcgcttgttttttttgtacggtaaaaatcaataatcgtatttctagtgatccgataaatccagctgtcgatcttttgttcatcgatcagatttgggagatgcacttgtattttcataaatacgatttgcaagaggtcatcaacgatagattgatcgttaaccctttgtgaaatatatgtttttaacggctgatgaaattgatcccatagatcctctatattcatttgaaaaaacctcctataattttgcgtctgctttacatttgcttcgtctttttaatcgtaacaaagagcgaaacaattgttgaatcaattgtattgcagctgttgcaaaaaataatgataaaggagaggtttgttgtggagtatacctatttagggagaacaggattgcgggtgagccgtttatgtttaggcacgatgaattttggagttgatacagacgaaaagactgcgttccgtatcatggatgaagcgcttgataacggcatccaattttttgatactgccaatatttacggctggggcaaaaacgcaggattgacagagagcatcattggaaaatggtttgcacaaggaggacagcgccgcgagaaagttgttctggcgacaaaagtatatgaaccgatttctgatccgaatgacgggccaaatgatatgaggggcttgtctctatacaaaatcagacgtcacctggaaggatcactgaagcggcttcagacagatcatatcgaattgtaccaaatgcatcatatcgataggcggacaccgtgggatgagatatgggaagcttttgagactcaggttcgctccggcaaagtagactatattggatccagtaattttgcaggctggcatttagttaaagcgcaagctgaagctgaaaaacggcgattcatgggactcgtcactgaacagcataagtatagtttattagaacgaacagctgagatggaagtgctgccggctgcacgggatcttggtttaggagtagtggcgtggagtccccttgcaggagggcttcttggcgggaaggcattgaaaagcaatgccggaactcgtacagcaaaaagagcagatttaattgaaaaacatcgtttgcaactcgagaaattttcagatttatgcaaagaactaggagaaaaagaagcaaatgtggctttggcatgggtgctggcaaatccagttttaactgcgccgatcatcggaccccgaacggttgagcagctgcgtgatacgataaaagccgttgaaatcagtctggataaggagattctccgcatgttaaatgatatctttcccggacctggaggagagacacctgaggcatacgcctggtgatacattcattactcaatactgacatttttcttaaatatttatactgaactatcatattaggaaagacaagagcttgtttgtctcttgtcttttccacatcatgttgaaaatgctggctaaacatcgacaaaaatgctgccgcttctaaaaaagaaccctaaacaatagagtaactggaaagacaactggcttgatcagcttgggacccctttcagctgtatttaaatcaatcaaactaatgattcattggcagtctaaatattattattgtttgtttacaaaatagtaatagcccctgtaatgattgctaacaacgtaataactaatgatgtaattacagcccacttaacggcaaacctttgaaatgaccccaagtccattttaagcatacttactaacagtagtgttgacgcaactaatggactcatcagatgaaccggctgccccattatagaagccctcgcaatttctactggttctataccatatgctgaggcagcttctgcaaagataggtaccataccaaagtaatatgcatcatttgataaaacaaaagtaaacggaatactagtgagtgctacaataacggggaaaaaccctcccattgatgagggaataacggatattaatgatcctgctatggcatccaccatctttgtcccggataatataccagcaaatactcctgctgaaaataccaataatactacagttatggcattaccagaatgctcggcgattcgctccttctgcatttttacattcggataatttatagtaagggcaagaacaaaaccaattaaaaataaaactgacggatgcttagttccaagcacaataaacaccatgatacttataacgaggaataaattaagatatattaagcgtggccttttcaattgctcgctctccaaactagcagccatataagattgagagctgtcctttgttatatgtctaggctctaattgaacgatgcctattcgattcctctctttccttcccattagaaaagccagaaatatcacacaagcaatacctccaagcatggtcggaagtaatggcacaaaaaaatctgaaggatccaaacccagcactgaaatcgctcttgtagctggtccgccccatggagtcattccgctaacgatactcaacgacagcattgctaatgtcgccataaccatgggattcataccaattcttttatacaaaggtaacattgctgagactgttatcatataggttgttgtaccgtccccatctaaagcgataagcattgccaagacggcagaccctatcgctattttcacagggtctccctttactatagataaaattttttctattagcggatcaaataaacctgcatcaattaaaattccgaaaaaaagaatagcaaacaatagcaatgccgctgaacttgcaactgtttgaattccttctaaaatcatgtcgccaatacccttaccaaaacctccaataagagcaaaaacaatgggagtgatggtcaaggcaacaataggcgagactttctttgtcattattaatattgtaaaaacagttaccatcgaaaaacctaaaatagtaagcatattacacctccaagaatgcgctttcaaatgacttttgattaacatatcttatacggtgtaataagttaaataaatatttttttactgtgtttcaaaaaaaattctatcataactttaaatggttaccatttgttcaccctttaaaaaatcaatgaatgctttaacgagtttgattcctaatgatttttgatcgtacattagccaagtatctctcattagaggcttacccttagcattatacagttccattgtgtacaaatgatcagattcctgcaggcaaatttctggtgctatggagtaaccaagaccatgctttaccatctctttgcaagtctcttgtcgatccacttccattgcaataatgggggcttgttttagattcgtatgcatccaatcttctataatcgtttttaaagaagcatccgttttatatttgataaaaggtaaaaaaggaagctgctctatcgttattggtttttttgagatgatatgtaatttttcccgtgtcagccgttcctccacccctttccagcgatggcttcctctcagtataccgacttgtacaataccagcatctaataatttcatgacatctgtgctccagcctgtttgtacactatattggacattaggatacatagtggaaaattcccttaataacttagggagcttatattgagcgaaattgcttgatacccccagccttagatgtccttgcacctctttgcttagattagagatatgatctttggtatcttgaagttcctgtagcattcttcttgcataagcaaccaagtgttctccttccgcagtaaaggtaattcctttatgccttttggtgaataattcaattccgaaaatctcctcaatcttattcaaccgataagtgatggaaggctgtgatgtaaataatcgttctgctgtttttgttacactttgttcttcgtgaagaattttcaataaaatccaatctttctcatccattttcatcttcctttctagtccttctttcacaattataaaagtttttttatcgaatattaagaaaacttatattttatttttatttttttaccttctacactaaaaaacataaaaaatactacctttaagatgaggatgatgacgatggtcaagacgaatgtaacaatcatgagaggcggaacaagcaaaggcgtttttttccacgaatcagccatgcctaacaataaaaacgaatgggagccctttttgcttgatgtcatgggaagtcctgataaaagacaaatagatggtttgggtggcggtaattcccttactagtaaagtggcaataataaagaaagcatatacttcggatattgatgttcactatactttcggtcaagtcagcatttcggaagaaaaggtggactttaaggggaactgcggaaatatctccgctgctgttggtccatttgctatcgaagaaggacttgtaaaagcgacagaaccaatgactgcggtaaggatcctgaataccaatacgaataaaatgatcattgcggaagtggaagtggaagacggtcaggtcaaatatgacggagatgttacgatatctggagtgcctggatctggatctccaatctatttaaactttcatgatgccgctggttcagttaccggtcatttattgcctactggaaatagttcggagtttttagatacaagtcaaggccaaatagaggtgtctattatcgactatgcaaatccattagtttttgtggaagccagcagtatcggcctggagggaacggaacttgcagaagaatttactgatttacagttggctcaatttgaagaattaagatccattgcggcagagaaatgcggctttgccagtcgattttcagctacaaagttatcgccggctgtccccaaactggctatagtagcaaaaccagagaaatataaagatagtacaggtgcttggcattcaagcgttgagatggacttacacatcaggatgatgtccatgcaaaagccacatcaagcactggctgtcactggagcgatatgtacaacaagagccctttcagtggaaggtgcaatccctgcaagaatagcaaaaaaccactctacaaaggttcggctagctcattcttctggtattattgaaacaatggtggagcccactggtataaagatcgtccgtaccgcacgacgtattatggacggaacagtttatacgcatggagactatcaaatgatgtagatggactgtgcaaaaagcctccccctttccatcgttaatagatggattgaatgcgccttcttgcacagatccattgtaatcttgcatggctttaaaaaagcctctatattgtattttatgaaatcgccaaggtcctttcatgtatctgcctcaagcatgacataatcattatagagaaaattgaatactttttactgcaaataaaaagataccaacatcattggtatcttttagattgagttcatctgcagcggtttcttttcctcactgcttatttgattacaaaattaccgtactcgtttgaacgaacatgaatcggtccgtttagattatagttgttctccttggcgatagagcgaagcacgtccacacgggcaactgattctctccattcgtcacgggtgtcatgattggccggattcatcagatcgtcatagcgtacgtccaagaatttattcaaccacttcttctcgtctattccgtctttaggtgatccgcccgcttttttgttcgtacgtttaatcaaggcataaaaagagtcagggtcatcaccatcgccatgctgaataaccgtatcgtacatcacagctctagccaatgctgtttttagtccggcattatccgatcgtttcatggcaggctgataatacaaatggtcatttactttgtcttgagcggcgcgaaattccttatcatttgcaagcgacttccaggcagaagcgaatcccttgagattgcttgtatcatcgctttcttccttggccagacggcgcaattcagtcagatactttttcagtttgttattcggaactgcctttgtgtatacttctactacttccaatgcatccccggtagccgttgtaaagcccgcccgtccgcatgtatagcctcgcccgtcatccaatcgctctacatatccatattggatctccgttgtgccgttttcaaagatacttgtcagctgttccgcccggcgcttttgatctttattcagtcccgccgcaaaaaccgtttcgctcatcatcagggtaaaaaacatggtgaaaacaagtaatgagatcgctgcttttttccaaaaatctgctttttgcatactgattttcattttacttcccctttctaaatattgtaaatacagactcagtatacatgatgaaactgccctattgttgaaaatacatcaatttgtaaatattttgaatctaaagtaatatagcttgaatcttactcttttcattgccaatcagccttagcccctctcactgggaaggtccctttcatactgcttcaactttcattaacaagatgccataggctttactctattttataatggaagtgatcatcgaaaatcgttagggaggtgatgtaaatggcaagcaagatgagaatgccagattccgcaacgtcccatgcaaagcctactattgggaaggcgatactttgcatggggtagactttctaaaagatcgcccaagtaagcttttctgatatagtggctttgcaccttatttgacataaaaaaataaggagctggcagaaatggcatatgtaaaagcaaccgctattttacctgaaaagctgatatcggaaattcaaaagtatgttcaaggaaaaacaatatatatccctaaacctgaatcctctcatcaaaaatggggtgcgtgttcaggaacaagaaagctgatcgatgacagaaacgcttctattaaaaaagcatttaaaaacggcaaaaccattcatcaattatctgatgaatatcacctctctattgaaacaataaaaaaaattgtctactctaaataaacaaaacggaagcactgataaaaaataatcagtgctttttatatggcgagtttgtttcttagttatttcctgcatatgataccattggccaattgtgtaaagttaagggagatgagaagaaaggaaggtcctacaaatgacgataaacaatggaacgttgcaagtacccggcgcgaacatccactatcaggtgcgtggctcaggtccaatcattcttttggtccacggcggaggcggtgatgccgacaagttccatcatgttgccaatcatctggctaactggtactcggttgttacttacgatcgccgcggccattcccgcagcaatctcgccaatcagattgaggattaccgtgtggaaacacacagtgacgatgctcaccgtcttctagccaaaatcaccaataagccggcctatgtatttggaagcagctccggggctgttatcgggcttgatctgtgcatacgccatcccgaacaagtacatgtcatgatcccacacgaaccaatcttattgcagcttctgcatggaaatgagctgaaacaagccgagcaattcatggaagaccttaagaaaaatcatcaaagtgaagtcattaagttcatgtcaagattagagacagacgaacaatcaaaggctgtgctgacaaagcggcttctcggcaattcaacgtatttcactgagtatgaaattcaaggaattctcagctatacattagatttcgaagcattaaaaactgtgtttacatcttcaccgatgaagatactcccagctggcggaagtgcttctcgggagctttttccttatcgttgcgcgaacgccctagcggaacaattggaaacagaatttgttgaattccccggaaatcatacggggtacacaatgtaccataaagaattttctgagaggttacacgacatgttagaaaaagaaaataaacatacgtgttcaaaataggacaggtaaaactaactatggaattggagaagatttcacgaagcgtaaaaagaacttttcactaacgagaacgcaatgtgagatgtttaaccaaagtgatattagggatttcatcgaaaaataggtttgtacattacgttctcctattgattatttcctatcttaattccgtattttataccattagatacaactctaaagcggctcgttattttgtcctcaacaacaaccagtgtctaacatcatgaatctcttttgaaaatcaccacaaatgcaggtatggaagacttcatcgcagcaaaaaccataccaactattgttgttggtatggttcgtcctagataggcccttaagaagagattctattgtacggagtatttagctaattgcatttgtaaccgacagggccgtctgaacctgtgtacacatatgtgtcagacacatatccaatattcacgacaccccgggaatctttccactggatttggtcccagatattactcgttccatacttccctgtaacagtcgttccataagcgtaacaataataaggaacacgggagccactcggaatggaaagcataataggataatttgtaccaggaccgctgcgcatattgacaggcgcaccgctgcttgttgagacagtaaagtactgcacggcaagtgcctgactggaaaaaatgaataaagatgcaatcatcacggttaacatactcagcattttcagtttagtcaatgtcatccctctttcttcaattccttcattttaagaaacgatagaacaatgctaccagctgcatttaggaacaaccggaccgtctgagcctgtatacatatatgtatcagagacaaatccaggaacgatctccccgctggcaagcgtccgctctgtgtaattccaaatgttactcgttccatactttccagttacagttgtaccggttttgtagcaatagatcgggatgcgggttccgctcggaatagtcgttacaattccccaacttgtacctgggccgctgcgcatattgacaggagcaccgctgcttgttgaaaccgtataatactgagctgcaagtgcatggctagaaaaaatgaacacagatgcaatcatcaccgttagcatacttagcctctttagcttattcaccttataccctccccttataaatgccgtacgtttgactttcttacatccagttaaggatttactttcagataccatgccccctcccctctcatatatttatcaatgtaccataaactagatctttcaaaagtggaattattcctatgttttcgacaattaaggatacaaaataaatggtagtcaggcttgatattgatggtgtgttacatttggcatttgtccagtcggtaatcacgattgacaatcaggaaaaaggacatggatcaagcggtttcgtgtccaccaattaactcaatcagtgtacttctgccttgtatccacgcttcttctcgattcatagatactccacctttttcaccaatcaaaaacggacaccaaacaaatcagcgtaaatgctgcaagttcagtgtccgcaacctattatgactttgctttcttttaccagggcgtataaaaatgattaggtacgttatcaaacgttatattctatgattttgcgagtcgaaaaatcataacattttatatatttcaatcagattatgatctggatctctgaagtgagcaactcgggcactccattccttgcgatcatgcggtttatttacacatttaactcctttttcgtgtaaatcgtcatatgttttatcaacatcttctaccttaaactgaagcaaaaattttgattgagcttctccttccaacgattttttttcctctccaacgatttcagccatcgtttcacgagataaaagctctattttcgtttccccattatcaaagagtgcatattccatttcattctctaaccaacttattggaagtcctaatgaatctttgtaaaactccacgcttttcttaaaatcattcaccaacagtctaatttgtaacagcttcatatcgagtgcctcctataaaaccatactttttactggtcatccaatttaatgatacaaaaggaaacctgacagcactatgtcaagtttccataaataaatttcctacttcacctttatttcagatttaagtgcagtttattccatgtcataagaaatgtacgctaacgagcaaaaacagcgattcttaaaacaaaaaatgataccgagtgtattttctgtatgcttcaacttcatttcgggaaatgtaacgttgataaaggaggttacatcaatatggatcatcaaacattggcagctcacgaggctgttgacttacatgaaatcgtgaactttaaaacactttgtatagcgaaatcaaagttaatgcaaggacttgtgtttgaccaagaactgaaggacttgatgcaaaaagatgtacagcaatccattcaagaccttactgaattacaagcggtttatgagcgtgcctcatttcaggcccctgtccctcaaagccgcccaacgccaatcatcaattgaaaggaaggtaagcctctttgaataatgatcatttagaccccattaattcgctgaatgtgcctgaactagcagacactacattcgcgatggattttcttatacgagctaaggaaggcgtaaggaatactgctgtagctttgacagaaaccgcttcaccagatgtaagagccttgctgcggaaacagctgatgcaaggaattgcaatgcaccaagagattacggaactgatgatcagcaaaaaatggttccatccatatgagctgagcgaacagtataagctggatcagctctctgcaaaaaacacgatcatggtcggcaatatgaacctcttccctgatgaaacaaatcgtaaagggatgtttgaccggacacctgatgaacactaacactggaggttttacagcatgaaggcagtaacgtatcaaggcattaaaaatgttgttgtcaaagatgtccccgatccaaagattgaaaaatccgatgacatgattatcaaagtcaccagtacagccatttgcggatcagatttacatttaatccatggattcattccgaatatgcaagaagactatgtcatcggccatgaaccgatgggaatcgtcgaagaagttggttctggggtgactaaactaaaaaagggagatcgggtaattattccctttaatatagcatgcggggaatgctttttttgtaaaaaccagctggaaagccaatgtgatcagtctaatgacaatggggaaatgggtgcttatttcggctattcagggcaaactggcggttatccaggcgggcaagctgaatatttaagagtgccgtttgcgaattttacccattttaaaatccctgaatcttgtgaggaacccgatgagaaattaagcgtgattgccgatgccatgaccaccggcttttggagtgtggacaatgccggcgtaaaaaaaggcgatacagttatcgttctcggctgcggaccagtcggcctgtttgctcaaaagttttgttggctaaaaggcgcaaaacgcgtcatagcagtagactatgtaaactatcgcttacagcatgcgaaacgtacaaacaaagtagaaatcgttaattttgaagaccatgagaatacagggaattatttaaaggaaatcacgaaaggcggagcggatgtagtcattgacgctgttgggatggatggtaaaatgagcgatctcgagttccttgccagcggcttaaagcttcatggcggaacgatgagtgcattggtcattgcttcccaagctgttcgcaaaggaggaaccatacaaattacaggtgtgtatggaggcagatataacggttttccgttaggagatattatgcagcgaaacgtcaatatacgctctggacaggctcctgtgatccactatatgccgtacatgtttgaactagtatcgacaggcaaaattgatccgggagatgttgtcagccatgtcctgccgcttagtgaagccaagcatggctatgacatttttgattcaaaaatggatgattgtatcaaagttgtgttaaagccttaaaaaacggaggttacagaaatggaatacgccttacacgaagtgcttgaggttcaggaaatgactgcatttaagacactttgtttgacgaaatctaaaacaatgaaagcactggtatctgatccgaagctgaaagaaatcatgcagcaagatgttgatatcaccacacgccagctgcaggaatttgcctctattttatctaatgcaaagcacgaatgaggagatgaataaatcatgaatcctatcatagaatatctgactggcatgaatgttctaacagaccaaatcattgctatggacttattaatttcagcaaagaacggagtcagaaattatgcgatggcagccactgaagccggaacgcctgaagtaaaagaggtccttatccgccatttggaagaagcactcgatatgcacgaacaactctcaagctatatgatggaaaaaggctggtaccatccttggaaccctgacgaacaagtcaagctgaatttaaaaaatattgatacagccattcaattgccaaccctttaacatacaatgactgatttgctgaggaacagtattgattggccacaactgttcctcagcttcaaaatgagcactgtttgttcgggtcctatgaccgtaaatagattaaccgcttttctccatctgatctccgataatgtttgcaaattctccaatccaaataaggaatcgtaaccacctctttttatgcgatctcttgatggagaaaacaggccagaaacaaaatccttcgtttttgacctgccctcttcacacgcaaagaatgctaccttctttgctccactgatccgtgaagactttccgttttaggcctgcttttgagctttgcctcattttcacgcaatttcccatcataatctttaatttttgtgtctaatctcttaattgtttcatcaatttctttccgcttctctatcagccgctgtcgttcgtcagccaggatattttttcgagcttctaccgtacagtcaccttcggtaaataatgttgtatattcaattagcgcttctatcgatagtcccgcatttcgcatgcatttaatgaattcaatccatttgatatcttcttcatcatagtcgcgaatgccgctgtcttttcgttttacaggcgggattaatcctacacgttcgtaatatctgagtgttgcggctgtcaggccaaactgctttgccacctgagcaatattcatgatcttcacctctctatcctgcatgttgtgaaggtaacacttaaagttaactttaagtcaagctcaagacaagtggttagctgctgaatctgggtttatatattcgggacttgccttaaagcacactttaagctctatacttctccatgcaataaaaacagtgtagatggagggattgctgaatggcaaataaacaaactgccggaagagaacaaaccaaagtttgcttaacttcatgatgatgttctattcggtgacatttgggaaagagaggaagaacttccccccgagatcgcagcataattacagtttctacgttaattgctgactgtatctcaacttataaatcaggttcattttaaatgttattttaaaaaaacccttgccttaaagcagactttaaggtttatcgttatgttgaagacaccataaaacataaataagtgcatgtttttttacaacacttatgatgaagaaagggaaggttcatatgtgtaatcaacatcaaacccgtgtattaagcgtgtcacatgcaaaagccaaatttgaacaaacgacgattgagcgaagaggattacggccgcacgatgtcttaatcgatattaaattcagcggtatttgccattcagacattcatagtgcttttgatgaatggggcggtggcatcttcccaatggtgcctggacatgaaatagccggtgtcgtaacagccgttggagcagaagtcaccaagtttgctgtcggagaccgcgttggtgtcggctgttttgttgactcttgcggagaatgcgaatactgtctcaacggagaggaacaattctgcacgaagggtgttgttcaaacgtataactcagtagactacgacggaaaccccacttatggcgggtacagccaaaaaatcgttgtcactgacagatttgttgttcgcataccagatcgtttggaaatggatgttgccagtccgctgttgtgtgcaggtatcaccacgtattccccgctgaaacactggaatgttggccctggtaaaaaagttgcgattgtaggcgtgggtggccttggacatttggcgattcaatttgcacatgcgatgggtgcagaagtaaccgttctgagccgttccatgaataagaaagaggaagctctggaactcggtgcaaatcattactttgcaacaagtgacccagctacattcactgcattggccgggcgttttgacgtgatcttaaatacggtatcggcaaatctcgatgtagatgcctatttatcaatgcttcgtatagacgggacacttgtaaacgttggagctcctgccaagccggacacatacagtgtgttttccctaatcatggggcgccgcagcattgcaggttctctagtcggcggaattcaagaaactcaagagatgctggatttcgcagctgagcatggcatcgaacctaaaatcgaagtcatcggagctgaccaagtggacgaagcatacgaacgtatcctccgaagcgatgtccgttatcgatttgtgattgatatttccacattgtaataggttattccttatatggggctgacccgcttttattgaaactcacgaaaaacgatctcgttaagcaaatattttgaaggccggtcaatcttcctgttattctatgaatagagagttattaggagggttttttatgagcaaaaaaatcgcagttcttgttacagaccaattcgaagacatcgaatatacaagtccagtaaaagcatacgaagaagctggctacagtgttgtggctatcgatttggaagccggcaaagaagttaccggtaagcatggcgagaaagtaaagattgacaaagccatctctgatgtggatgcaagtgactttgatgcacttttaattcctggaggattctctccggatttgcttcgtgcagatgaccgtccgggtgaattcgcaaaagcatttatcgaaaacaaaaaacctgttttcgcaatttgccacggcccgcaagtactgattgatacggatcttctaaaaggcaaagatatcacaggctaccgcagcatccgcaaagatttaatcaatgccggtgcaaactacaaagatgcagaagtagtcgtcagccacaacattgtcacaagcagaacacctgatgatttggaagcatttaaccgcgaatctttaaacttgttaaaataacgagaaggcacagactgttcgggtctgtgccttttttaaaattaagactccttctttacattctgaaagacagcagtcgcgtcccacacattcaagccaaattgaccttctgaaaatgcggaatcatttgcatcaatcacaaggcgatcatctaaatagattttaaagcgatcgccctcggcctctgttttcagatgatacttttgattaacgtctatcggtgttttgtattcagcaatgacagaagcaacaccgttctcaaatttaaagaatttcactagatcatgctttgcatccacattggcaaggtaaccgtttttggcatctttgtcagagcgaaacattagtgctcctgcccctcttccgtttccatccttaatggtgatatcagattcataagtgaagtctgacccggatgctgaagacaagataaaggaatctccgtccgacctcccttgtttcccctcaattgtgtcggcccatgtgccatttacagtcgtccagccagtcatattggacataaaaggtgacgttccccataccttttttaaagggtgtatggttaaagattttacctttacgccgccatttgcagcatataattcaagccctttgcttgatcggtctgggagaataatatccgttatgacctgctttccgtcattcccaaatacttcaaccgaggagcggtcaacaaaaatgcgcatcttaaccttcccatttaccggcttcaatggggctgtttcttttccggtgttaaaggccggattaaaggtattgttgcccgactcgctccggtcaacgaacaatttggcgttccttcggtcatagccgaccttcgtaaattgattttcacctgttcggaccttaaaaccaaattcagcagctgaaccagggcttactttaaattctgcatttatttcataggcatctccagattgccccgctaacacattatgacttgcaggcgatatggtcagattcttccacttcttagaggttccgcgaatggtttccagctctttcaccggtgtttggaccactctaaccccttcggtaaacgctttcaattttaactctcttggaatggacgttgcacttctccatggggatgtcggaacatcattcgcatattgccaattgctcatccaccctaaccatagccggcggctgtctgtggatggaatatcagaccaggatacagccgcataaaagtctctgccgtaatccgtccagagaactttgtttggcgggttttcatttttaaaatgagttccatcaaagtcccctacaaaatattgcatgcctgatcctcccgagaccgctccgtttccgacactgacctgcatgacccatttcttttgattcggattgccgtctaccggaagctcaaataaatccgggcattcccatactcccccgtggcttccttgatcctgtccaaattcacttgcatacgtccactgcttcagattttttgatgtataaatgaggattcggtcaccggccgcaagcaccatcacccactttttttctttctcataccaaaagacttttggatcgcgaaaatcttttttacccgggtttggaatgacagggttgccagcatacttcgtccatgttcttcctttgtcgttgctataggcaatactttgcacttgatggccttcccgatcctgtgtataaatggccacaagcggcttctctttgcctgtttgaaaaccgcttgtgttatttttatctacaactgcgcttccagaaaagatcgtgcctttttcatccggatacagcgcaacaggaaggtgttcccatgtaaccaaatctttgctgacggcatgcccccaatgcatgggcccccactgaagcccgtatggatggtattgatagaacaagtgatattccccagcataatataccattccgtttgggtcattcatccagtttgcctccggtgtgaagtggtattgaggacggtaatcctcatcatagtagcttgaatcggctgcatctgccgaaaatgccatagtcaacagcagggtgaacatgatcatgacttgaataagtctctttttcatttgttccttcgctcctctcttcatgtttgaacactttcaagagagactgctgcgcaagctggtccgtttctggcaattctcctctgtttcactgttatccgaatgatttatatatgaaaagactgctgcagtttctctctctttccttcacacaccttatgctaagaatccagcccaatacccgagaatcccgatgacaaagatgccgcaaataatgagaagtggattcacccctttgcgaagcatccatgccaccaataacgttaatccgagaggcagcgcccccggcataatgctatctagcacgttttgtaccgtttgaacatctacttttccgctttcatccttaatcctggatacaacgattggaatgttgatggtggtccatttggacacgagagcccccataacaaataacccgagaatcgaagcgccctctgtaagcttttgaatgcgattccccgctaaatcctgaagaatctccattcctttcacatagccatactttaatccgtaatattttgtgcttaatcttatggcattcagcaagaaaaagaatagcaaagggccggcaatgtttcctcctaaagcaagggaggctcctagcgcagctaagacaggacgaatcgttccccaaaaaattggatcgcctacgcccgctattggtcccatcaaaccgattttcattccgcttatcgcttttccgtcaattcctttattgttcgccatttcttcttccatggctgccgtcacgccaaatataggcgctgtcagccacggatgtgtattaaaccattccaaatgccgctgtaaggcttcgtttcttttcgctccgggaccgtacaattttttgatcgccggtatcatgacataacaatatcccattgcctgcacacgttcgaagttaaaggaaccgagtaaaaaatttgaacgaataaacatgctgaaaatttctttcttcgttaatcgtttttctttctccattttttcttccccctcatcgtttaggcatcaagatcatcatcatcgtcatcataaacagcaacactgccactgtctgatgcggccgcgactgctccgtgagcgctttgtttttgcatcacctgctggtataaaagcgccagacagagaccaagggctccaaatcccactaagttaaaatcggtaaacgccgctaataagaaaccaatatagaaaaatggctttaaataaggaatattcatcatattgatcaccatggcatacccgactaccacaataatgcctccgcctatttgcagtccttttgtaatgacatcaggaatatttcccaggaacgcctgaacagcgctgacactaattaaagcaacaatcaatgtaggaatcatgacgcgcaaagcttgaaacaccatcgcggtaatatgcataatttcaattccttttatatttcccgcttttgcatattgatcagcgcggtggatgaaaaagacagtgatcgtccgaacaaaaatcgtcagcgcctgacccgcagctgctaaagcaacagcgacagcaatcccctcgccaattccttgatcagcggtaataactaaaatggttgagatgacagaggcgatcgctgtatcaggtgccatggcaagcccgacgttcatccagccgagcgccatcagctccagtgtgcctccaagaataattcccgtttttaagtccccgagcaccaagccaaccaacgtacaggccacaagcggccggtgtgtctgcccttcatccaatacacttgcgattccggtgattgctgcaatgattaacaacaaaataatttgtaatgaagacatattctcatccccttgattattttgctacgttccgtaaaatctgtacaaaatcctcactggcatctgaaggcagctgcctcaattccagtttcacgcccttgtcacttaatgtttcaaatgcctttatatcttgttctgtgacactgactgattttgtgatttgcctgcgatgattttcaaaacgcattcccccgacgtttacggttttgatcggtacacctgcttctataagagatacaatatcggacggattttcaaacaagagcattgccgttaccccttcgtagcgcggactatgaaatgcttttgccattttagaaaccgagacggcactcgcctttacatttgaaggcgcaacagaaaggatcagcgtttttctcatttcgtcctgagcaatatcgtcggagacaacgatgattcggtcggctgcatggacttttatccaccttgtcaggatttggccgtgaataaagcggtcatcaattcttgctaacacaatgttcatcataattcatcctctcttgtatcttgattggctgtttttactttttctaaatgttcactgcacacttgaaagctttgctgactcattgcttttaagttgttcagcaaatctttgagagccagatgttctctcaggcttaatacctccagcagaatcggcaggtttacgccggctgccatatccattctttgatcctcagcaataaaggaagctgccgcgttatatggcgtccctccaaaaatatcgactaaaaaaagcacttcatgttcttccgggatatccttgagcgcctgatgatatttttcttgcagcgtttgtattccttcccctttaaaaaacggcactgcaatcaggttattttcttcaccgaatatcatccctgaagattcttttaatgctatgggaaaatctccatgaccgctgataataactgaaatcatatctattgctcctttcctgttttgtacatccatatataatgcaaggatcgtgccaacacagttgtgttaagcgttttcattgttatttcagccaatagcaatttgttgtcgaaacacttaaaacgaaaaaaataaacctgtattaaaatggtgttccatttaatacaggttcatataaaaaaactgtttttaaaacagctggccatgcacttcttcagcaaatatggcggctataaataatttttcatcatcacttatgcgaagtccgagcttttcttcataaggggctaatgttcgttctgtcacgtacaccatttccttcagctgatcattgatctcttcttcctccgagaaagcgatcggattctgcttaattaccctttcaaaggcgaaagccgtgtgcataatgactttaatcaaaaccgcattattgaaaatgacccccagctcatcttgaacggtttgcagccactccaataacatttcgatcacatggtggggattcaagaagacaaggtattttttcaggctatcctcgcaaagctccctgacaataatatttgcttcgttcaatccattgctcaaggggatgcttccttttgtaatcgcctgttgaatcagcttctctccctccccttcaattaacacttctaaagatacatgcggagcattgattttagggtctttcgttccgactgtcgcaaggatttcatactctttttcgatttcttttatgctgttggccagtttaatcgatgatacggtcaatatgtgaatcggggtatcggaggccttgtttacgatcgtggttagaatgtcttccagctttttggccgttccgctgcccgtcgtgcagatggataccaatgccttctttttgccggatgccgctggctgacgctcccacagctcgataaaatccttcgtgaccgattgatagatcgcatgcaaatttaaattcaaatagttgacctttctgacagcatccagcaccattgaagtcgtaacattgctgatcgttttgatggaaatacctgtcttttcctccagcctgctttccagcattgcaagcgaccccatgtctaccagcattaaaacaccttcaccttcatcaacctgtttcattttttctgctacgcattcaagaatgtccgaaggtgaaacagaaagtggcatatcgactgctgcaatcggcgtgctccctagcagttctgtcgcaacttcaaccatcgaactcgccgtgctgtttccatgagcagccacgatgataccgactcttttgttctcctttaacgatttgatggaatggattaacatcgttaagtagatgacttctatttcaggaatagccactttaaaatattcctgaattttatctttaaaaatcatcgccacccgatattctttcacatgagtatcacgaatttcatcagtctcctgtgtattcaaaacatcaatttgctttcctcgctttaaaaatgcgtcaatatgcatactcaagaaataaataaacttgcggtcaaatgtacaatccagctcatgttcagctatttcttttaactgttttgtcatttgaatcacgtcatcttcaacgaatgtcagcaggttgtctttttgaaaagcttgatgatgaaaaaaacttctgacatgcaaatggacatcagtcaagatgtattggttaatatcctttttggataaaccttctttcataagcgttttcactttttcctcaatcaaatgatataagttaaatgaaaggtcttcgtcaatttttgttgtttcatcttctacaatcggagagataatagttgtaatattgacatattcagaaatggctttgcttctttgcatgtttttgctgctggacatccattcttgcttgatttcatcaggcagatcgcgaacagtcagttcaataacctcatttctgtcaaggttatgcaaaaatccgtgtgcgcaaactaactggacatttgatttcagctgtccgacattcccaaatttcgcagagtgaataagcgcattatagacatcgatatgcacactcagattcttcttaatccgctctgcttctttccctaataaaaacgtcgtcagatcgactctttctttaagcgatcgttcttcaagcgaaggaatatgaatggtcattgggattcttcgcaaaaacgttttcaatagtgcagaactcggattttctgtagtcgcacaaataaacaatacgttcgatgttcgtttatgttcagattctccaagcctgttataagaaccgctgtcaataaaataaaacagcatttcttgtccctcgggagggagacggtggatttcatccataaaaagaatgcccccattggcctgttcgactaaacctgccttatcctcggcagcacctgtaaatgaaccttttttgtgtccgaataattgagaaagcaataattgagggttgttgtagtagtctgcacagttaaatgtaataaatggtgcgccggccttcaatatgtcagagtaaatggcaaactggtaaattcggttcgcaaaaagggatttaccggaaccagtcggccctaggaggagcatatgcagaccgttcggcggataaaagacagctgcttttgcctgggagatcgctttcttcaaactcccttttgcccctatcataagctctaggggattcgtggaaatgtgttgatgattttgctttgaatttccggaaaacgcctgaaggtctttcacttccatcatctctgtatcccatttcttgttgaataatttttctgctatctcgactgggatgtatcttacaggaaacgttttaattttgatgacctttttggaccggacgagattgttcaattcaaagctgacattggaccgctccattttcagctgctcggcaatctcctttgctgaattcccttgtatttttaaaagatgatctaaggttgaatcatgaaaattatgcttgagctgatggtatattttatctattcttctcacgtctatcatcctttgtccttattagataagccattaacaagaatatttcgaaaatttatagtccgcgttgagattatctgctgatacacgtttaaaaaggtctctatagcagattgacaaaactggcttttatgcgtatatgtttacatgttgaatcatttgcatctcatattagtatgatagatgctcagttctcgagggccagtccccttcaaaagtaataatcagtaaacagtttatcattctcggggaatgtaatgatgtcaaaatcatcaatgacaaaaaatgaatcttatagatcatgacaaattacccaaatataaccccttaagttcgctcacaactaaaaagacgggcactctatgtgaccgccacagtattacaatttgcaaaacttcgtcatttttgcaaagttaaggaatctgtaagcttaaaaactttatctccgatatctctcgatttgatcccccctgtaggcctcaaacatagtgggtatgcaattatacaaatcgttaccgattaaaactagcctgtcagattgtccaaatgactttcctgttttactctgctattcaggtagaatcaggagtgaaaatagagccacaagacatgtaacagcacttaaaatagttttaaaatttaaaaataaaagtatctattcttttaaatgttataatatccgataaaactttacacatctttttattactggaggaaaataaaattgataggcaattctagcaaagacaattttggccagcaacagaaattgtctagaggccttaaaaacaggcatatacaattaatggcgattggaggtgcaatcggtacaggtttatttttaggttcaggtaaatccatccattttgcaggaccatccattttatttgcttacttgatcaccggcgtattttgctttttcattatgcgttcgctcggagaactgctcttatcaaatgcgggataccactcttttgttgattttgtaagggactatttaggaaacatggcagcatttatcactgggtggacctactggttctgttggatttccctcgcgatggctgatttaacggcggtcggcatttatacgcaatattggcttcccgatgtgcctcaatggctgccgggtcttcttgcgcttattatcctgctgatcatgaaccttgccaccgttaaacttttcggagaattagaattttggtttgcattgatcaaagtcattgccatactggctctgatcgtaactggcattttcctgattgcgaaaggtttttcggcagcttccggccctgccagcctcaccaacctttggagccacggcggcatgttcccaaatggatggcatgggtttatcctatcgttccaaatggtcgtcttcgctttcgtgggtattgaacttgttggactgacagcaggtgaaacagaaaatccccaaaaagtgatccctaaagccatcaatcaaatccctgtccggattttacttttttatgttggcgcacttttcgtgattatgtgtatctatccttggaatgtgttgaatccaaacgaaagcccatttgttcaggtcttctctgcagtaggcatcgttgtggctgccagtttgatcaattttgttgtattaacatcagccgcctcagctgcaaatagcgctttattcagcacaagccgaatggtctattcacttgcaaaggatcatcacgcacctggactattaaagaaattaacttcttctaacgtgccaagcaatgcgctgttcttttcatccgtcgccattctgattggcgttagtctgaattatttaatgcccgaacaagtctttacactgattacaagtgtttctacaatatgcttcatttttatttggggcatcacggtgatttgccatttgaaatatcgaaaaacaaggcagcatgaagcgaaagcaaacaaattcaaaatgcctttttacccattatccaactatttaacacttgcatttctcgcgttcattcttgtcatattggcactggcgaatgatacacgtattgctttgtttgtcaccccggtctggtttgttttattgattattttgtataaggtgcaaacccgcagaggacataagatgaaataaaaaaaagacaagggatactcactcccttgtctttttatatgtgtcaaacactaaattaaactttggtttcaaatctcattcacttcatttaagtgttaactcaaaccagttttgatgccgaaacctactaatattattccggtaattttttgaaacactttctggaacttcgagtttttcatccatttttttgcgtaatcaataatataaacaagaaacagaaaccacaacaccgctaataaggttagaattgaagctaaaatgataagctgctggtttatatttccgttcaaattgataaattggggcatgattgtaacatacactaaaacagttttaggatttagaatgttactgagtgatccttgcataaaggaagttttataataacgtttcggagaacttgccatattttttgcttgggattgcatgtcatctaacgaaaacatacttttagcaaaaaagctttttacacctaaataaattaagtatgccgctcccaaatatttgatcgttgtgaaaagaatcactgactttgcgattaccactgataatcctaaaatggcaatcaccgtccaaaaggaaagtcctgtcgccaatccgagaatgttataacggccggctttcggaccatacctaagcgtatttttcatcacaagcatcgtatctgcccccggcatgataaccatcatggcagcgatcggtatgtatgcgagtaagctgtgcattgttctctccccctttaaaaatcccctcaatcatatagtgactacaaaagtaactacttataaaagtgtatcaatgcatttggaataaatcaatatggtttgttaaaatagcgattactaaggcagcgattgctctttatattggaggatatatgaaagaaaatatgttagacattttaaaaaacctcaattttacagaatatgaatcgaaagcgtatttggcattattgcaagaatcacctttaacaggctatgccgttgccaaaaaatccggagtgccccgttctaaaatttatgaagtcttggaaagccttgtcataaggggagatgtttttgtcagtcatggaaatacacctcagtatgttccagtccccgcaaaagaactgattaaaaaccgccggctcaaagcggaagagcattttgatcaggctgagaaatattttgaaaagttcgagcagactgctaatgaccgggaaaacatctggaatatcaccggccgcagtgaaattcttgaaaaggtgaaggcttgtattttatctgccaaaaaaagaatcctcttagaaatatggaaagaggattttgaggagatagaatcagagctaaaacaggcggcagaacaaggcgttattgtcaccattattgcgtacggagacatcgtatctgatttttccaatgtttaccttcatgatatgagcagtgaaattacagaagagtatgacggacggtggcttgtctatagcggagatgattcagaagtagtagcgggcattgtctcacttggcaatgacagccgtgctgcatggacgatgcatgtaggtttagtcatgcctattactgaagtgatcattcatgatctgtacctcatggaaattctgaaaaagcatagagagctattagaagagagcttcgggaaaaatctcatccagttgcgccgtaaattttctattcactcagatttcaaaaaacattatttggaataatgtttggcatctcttaccccaaaaacaaggcttgtacaaaacaagccttgtttttttatgcataaaccccccatccccatgctgatttacttctctcttttaaaaaatgtgattctgcgcaaactatttttcagcctgccgcgtctatcctaggtaacagcctacgatatacgtatattcaaaaaggagccctttattgcaatgaagaaaaaacaaacaacaaaagcgttgcttgtcacatgcataactgatcataagcaagatttctaccggttggctttcagttatgtgaaaaatcaagatgacgcattagatattgttcaagaatcgataaaaaaagcgctgagctcagttgaaacggtcaaaaaccctgagacgataaaaagctggttttataaaattttagtacggacagccattgactttttgcgcaaacaaaaaaagataagagtgatggacgacgaaacgatagaatttttaagcaaaggaaaggaagaccattacaaggatactgatctccatgaagcgcttgacgaattgccgtaccgctataaaaccattattattttacgtttttttgaagacctcaaattagaagaaattgcggaaattacaggagaaaacacgaataccgtcaaaacgcgcctatacagagcattgaagctgatgcgcattcagttgacgaaggaggatctttcttaatggataagagattacagcaattaagagaagaatataaaaatgttcagattcctaaagaattggatatcattgttgaaaaagcccttcagcaagaaccaaaaaagaaaagaatcgtcatgtggccgacatcagcagcaatcgctgcagctattttattcactgcacttgttaatatcaacccggacgccgctcaggctatgtccaagatccctgtcatcggcaaaatcgtcaaagcgatcacctttattgaaatcaaagaggaaaaagaccaatcaagcattgatgtcaaaacacctgctttgtccgggctttctaataaagagcttgaaaacagcattaaccagaaatacttgaaagaaagccagcagctgtataaagagtttatacagtccacatccaaaaacaaaaaagggcatctcagcatctacagtgattacgagacggtcacagacacgccagatttactctctatccggcgcaatattgaaacaacacaagcatcttcctacacacaaagccgttatattacaattgacaaaaagaatgatattttacttacattaaaaagcttattcaaagatgagcgctatatcaaagtcatcagtcaaaacatcaaagaacaaatgaaacagcaaatgaaggaagatccaaataaaatatattggctcactgacgaagatgcagaaccgttcaaaacgattcttcctgatcagacgttttacattactgaagaccataaacttgtgatctcatttgacgaatatgaagtcgcccccggctatatgggcgttacagagtttacaattccaacccgtgtcatttcaaacttgctcgtgggagaacgttatattcgataaaataaaaacatccatctaagattatggatgttttctctcttctctattcgaggtcgtaacctcgctaccaaaaacaacgagaatatttgcatactattggaggaatacccatgtatcacaagacacagcatcatcgatacattcctggacttgatggccttcgggctttcgccgtcctgtcagttatcacttatcacctaaatttcaattgggctaacggtggttttatcggagttgatatcttttttgttttatcggatatttgattacatctattctattaccggcatatggaaatgatatcaatcttgattttcgggatttttgggtgcgccgcattcggcggcttatgccagcggcttaccttatgatcttttccactgttgtgtgggtcgtattgtttgatcgagaactattacacactgtacgtggagatgcgatctcttctctcttttatatgagcaattggtggtttatttttcacaagctatcatattttgatagtttcggttccccatcacctctaaaaaacctttggtctctggcgattgaagaacaattttatatcatatggccgatgttcttagttgttggaatgtacataatgaaaagccacgccagattggctgcggtgatatcattgcttgcgctttgttcagccgtgatgatgagcgtactgtatgaacctggcggagatccgagccgcgtttactatggcacagacactcgttcgtttgaacttctcatcggatgtgccttggctttggtatggccgatgaaaaggctgtcttccaacaggctgccaagcaaactgaagcacactttgcacgccactgaattttcggcattttgtattttagtgttatgtgtctatttctcagatgaatacgagccttttctttacagaggcggaatgctattcattagcgtgactgccgcaatccttattgcatgtgtttgccatccgagcagctttttaggcaatctgctttcatggaggccgcttcggtggcttggaacgaggtcttacggaatttatctttggcactaccctgttattgtgttaagcacgccagttcaagaaatcggaaaccctgttttttggcatatcgtgctaaaggtcattgtgacatgtatacttgccgagctttcctatcattttattgagaagccgatacggacacagggatttaggtcatttttccgccgtgtttttatacatagaatcatagaatggaaaacgacatctgtcatcagcaaactgtcaattggtttcgtcattttcgctatacttatttttgcaggagggctgtctgggttagccggagagcaaaagcaccctaccaaatggacctatagctcacaagaaacaaatgctgactccagccaggcttctggggataaaaagaacgctgcagcagataaaaaacactatcctgaacaaaagacaacagaatccgatcaacgtcaaaaggaaaacaaagatagtgggcaagagactcataaaaagaaagacacgcaatctcaacagacgaaaaaaccagcagacactgcgaaagaggtgttagctataggagattccgtcatgcttgatatttcttcacacctgcgtcagtcattttcaaatgtgacgattgatggaaaggtaggaagacaaatgtctcaagctttggaactcgcaagggagtacaagtcttttaatcagccgaacaaggctgtcatcattgagcttggaaccaatggctactttacaaacagccaaatcgaacaactgcttcaatctttctcaaaagcccatatctatcttgtcaatacacgggttccccgccaatgggaaagcaaggttaatgaatctttacagcaccaggcaagcgcacatcaaaatgttacgttagttgactggcatacagaagcccttcagcatccggaatattttacccctgatggtgttcacttggttcctaaaggggcaaaagctttgactgctcttattgttcaggcgatgaaatcgtaaaaaagagatcctatacggatcacttttttactttagtttctgatcgttgattatgtcttctttcagcaaggcagcccttatgtttacatgccgtttacgtaagggtaagccaaaattgaatggagggatgataatgaaaggaaatgaagaacatgacatccaaaaagagttgaaacgatatgagctttttttcaaaaaacgatataaggttctttatacattaaacgattttatcatcggtgctatgtttctcgttggaagttttttctttttctatgaccggttaatgtcggcagggatatggctgtttgcgatcggaagtttgctactgttaatcaggccgaccattcggctgattcatgactttcattaccgtaagcatgtggaacagcaattcaagcatcaatcttcaacagatgactgatcttaaggaataagaaagaacaaaatgccaaaagcctgagttgaaaatcaaaaacaagactttcagactatttatttttgaaaataaggtaaaaagaactaaacttttgcctctgcatgccgatatgaataataaggccggcgcgatactccctataacatccttttcagtagatttcattatcgtgccggttttctcatatgcaaagcaatcccgccaatcagattggcgggattttatattttacattcctgtccaaacgtcttttacataacgtttttgatcttgcagcttttgcagccattcagctgattcttcctgacttgctcctttttcagcttcatacgccaatcgcaaagttttctctacatcaggagccatttgcgatccatcaccgcatacgtaaatatgagcccctttttcaatgagtgtcatcaatttctgcgtatcttgcttgagcaagtgctggacatatccttttggttcgttttcgacgcgcgagtagcatcggcggattgtgaccaaaccgtcctgttccgcttgatccagctcttctctgtaaaggtcgtcatggtccgggcgacggcagccgaagtataaaagtgcttcaccaagggtgcttccttccttcttcaaaaccgatcttgcctgaataaagcccctgaatggcgcaattcctgtgcccggcccgaccataatcataggcgtttcaggctcatccggcatctggaatccggactgcggggtacgaatgaaacaggctgctgcatcatctgtattcaattctgctaaataattagaggcgacaccccggtattcacctcggccgctccatgctgaggctttcacaactcctaccgtcatgctcacgatatttgcatgaactttcggtgagcttgaaatggaatagtatctcggttttagtgatggcaaaagtgctaaaaaccgttcaaacggcatttcgcaagcaggataatcctctaaaaaatcaagcatggtaagacgtcttgcaagtacctgctctttgtaaatgccatcatctaaaacgagctgttccagctctttttgatgcggcggacagactgtataagaggccagctcccgaagctgaagccttgatgccggttcctgcagctctacataggacgacaataaatccgcaactttgatcggccgatccatcggcagatgagacatatgagcgcttccgcttacttttatcacatgattggactgcaaaccgaatcggctgagaacccgctgaacaagctccctgctgttcttcggcaggattccgatatgatcgccttctttatatgttttaccagccggaatttccaattcaatatggcgggttgaacgcgtgctgtcagctgtctggagttctcgattctctaacacaatcccttcaaaggcgccatatgctttagcaaccggcgtttccgtcgcttcactgagaaaagtaatcgataatgaaggcctgtcttctttctgggctatttcgttaatgtcaaatgcgtccattgtttccttccagaagcggttttcccaagactcgcggtggctttcaaaatcatcggcggcgtcaccttccccaatctctgttaaacgcgatgccccctttgctttcatcatgtcatcaatcaggcggggaatccgctgatacgtgctggcccagctccggtttccgcagccgaataccgcataggaaacacctttcaattggccttcctcaagctctttcagccactctacaaagccggcagcattatcaggcggcgccccattataagaagccgttacaatgacgactgcccctccttcagggagcttgccgatataatcatcaagcggagccgtttcagctgtaaagcccatctggcggccttgagcagccagttcaccggctattccctcagctgtcccaagatttgaaccaaaaagaacaagtaaaggtgtgccgtgtttaggtttggtttcttttggctttgtttctgctttgatgtctgcctgttcttttctctgtacattgattgccgctgttttccgcggtttcacagtaattttaaaatcatccggcttgatcgttaatgcttctttgatttttagttcgtagccagtatggtttatcaattcaaaatgctttaatacaagaccgagaaccattgtcgcttcttgaagagcaaactgcatgccaatacaagcgcgctgtccgtttccaaacggcttatacgcatggtgagggatacttgaaggatcctcaaaccgttccggacggaaatcttccgcatccggtccccaagcgttttgatcccggtgcagttttggaattaaaacagtgactggctgccctttgctgatcggatattccccgcctagaacagtatcctccttcgcatatagagaaaaagccggagctgttggatacagtctgagggtttcatttaaaaccatccgaatgtatttgagctgctggatttgtttatattcaggcgtgtcatccgttaacacgcgatccgcttcctcctgagcttttttcagtttttccggatgtgtaagcagacaataaatcgcaaaggaaagcaaaccgcttgtcgtctcatgtccagcaattaaaaatgtgatgatttgataccttatgttttcatcatccagcgtttcacccgttactggatctttggcataaagcatgagagacaagagatccttgatgttatcatccggattcgcctttcgctccgctatcattctatcgaccagggagttcatgacttctatatccttttgaaactgcagcttcgttttcaccatcatcttatcttgcaggcccagtctttttgattgattcatcgcctcttttaaggcacggagcatactggtgataaacggatgctgtgaatcacggtaaaagctgttgaatcgatagttaaatccgcataacccaatcgtatcaagcgtcagacgtgtcatatcgtctgctacatcaatttcttcattagggtttaaccggctccatttttgaatcagctgggttgcgatatccagcatcatagaatgatagcctttcatcgctttttgactaaaactcggcagcaaaatgcggtgggctttttgccagttcggttcgtgcgtccagcttgtaaataagccatctcccccgaattcgcgcaccttttgcaagcctttgccaaggttcttgtcaaagcggctttcatcacacacttcagccacaagattgtgacccgatacaaaaacactggatactcccggaaaatcaaaacggaaaatcggccccaattcatcagctatccgccataaggattgagaaagctgttctttttcaagatgcggaagattttttaaaggtccgtatgttttgggctgaggtattgcgcttgcctgtttcattaacatctccctttcctatttttgtgatgaatgaagcttaatggcgtcccagcagcattgttccaattcagtaattaaatcagtgtccatctctatatcacctgtttgaacgagctgatatatcttgagaaacgcccctaatacaatcgcaattaacacattagagggcaggctgcgaatcacgccttccgcttttcccttattaaaatagtcatcaagcatttgagtcagattttctatcatttttttgcttgtatgatttaagtaatgagcgtcttttttggtttcaagaaaaaaaagcgcatagtcgctctctttcgtaaactgaacgagacagcaaaatacgtggtgaaagccttctctgacaggcaattctgaaacgtcttgcttcagtttttccgtaaatcgctggatgctttcttgaaacagtacgttaacgagtgtttctttgctgtcaaaataacgatagatcgttcctgtccctacatgagcacgttcagctatcataggaatagtggtagcgtcaaaacccctttccgtaaaaagtgagactgacgctttcataatcatgtcgtatttactgctggatgcggatatcatgtaatctgacaacctccgattcgtttacggaatgaatattcattccttttgttcacaaagaatgtctgccctgtctgatatcacctctttgttctttcttctgttataagtttatatgaaaaaaactttttttaatataaagtatatgcaaaaaataaaaaattaagaaaatatacccaaatcctaatacaaggatcttggatatatttcccgagaaattttttatttaacagccacaatacatagacaggaagcacgcctgataacagaaagatccctgaaatgctggtctttcagcagttgaatatacgttttctctttttcaccggtatttgtgtcaatactgatataaaaccggccgtcaatttgaagcaccctgtaaatttctcttaatgcaagcctaatatcggtgcagctttgaaccgtatgtaaagaaaagactttattaaaggtacggtcatcaaagggaatgtcctctggatagccatgaaaaacctccccgttccccatgttctttcgattcgcacgtgatatctgtcttacctttcgctttgaaggatcaatgctttttaggcttcccttttctagtttcttggttatgcttttaaagacagtgccatttccaattccaatttctaaaattctgtcatttccttgtatatctatagagtcaatcatcatatgctcaattgttttggttagcttatatttccgagaaaataatttccaaaaattcgatcgtttatagagtctattttctagcattttaaacacctgcttttggtttcctatgtttatttattatattcaaaaaataaacatcatcttcattctaaaagtgaaggaaggtaccaactagacggcaatgtattgaaaaatgtttcaatagaactaaactttttcatttttttccgcaaaaaaagcagaaaacaaaatgttttctgccctctttctaatgccaatgataagggaatacatacagcctttgctgctgcattgccatcagcctctgctgtcggaatggatttccataaccatgtttgaaggaatgcggcatggacgcataaccatggccaatcgacggcagccttttttgataatcgttcatcatgccatcacctgcctcacagtaacgttgatttattgtatgcaggcaggcattttcttgacagtcatatcgctaaacttggtccttctccattgtataatgcatcaataattccattctaagcatatgccattcccccttcagtttttttcgttgcttttagcgccagtttgttaaataaagatgctttaactgagactctttcatttcatcataaatctgctcaatctgctgttctcgttcgaattcttccaggcttttaaaccgtttttttatcgttaacgttaaaaagaataggttaatcgtcatatcgctcaccccctttcaaagtccgcatcaagcgaaataacccgcggcacaccccttctgccgcgggcaaataaaaaccgcagacaaaagaagacaccaatgcctctactgcctgcggggagttgcgtatgtccgactattccgaatttaatgcgtgcgataagcatcggttaaggaaggacacgaactcttccacaggctgaataaaccatgaacttttacatgtgtatcacgtacaggttgacgtcgttgtctcattgtcattttggttcagcctcctttgctttttttcttactttgtaagtatatccaccaaattccattttgtaaacatctttttctaaaaatggacggaaattgtgcaaatcatcgaatggatttgcccgttggtcatgacacctgcttcatttcttttctggagcggtctttcttatgatatgcaataaaataaatgagaccgacaaatacagctccgccgatgacattaccgataaaagccggaatgatgtttccgatgaactgcccccacgtgaatgagcctgcaaaaatggcagcaggaatcacaaacatgttggcgacaacgtgctgaaatccgatagccacaaaagccatgattgggaaccagatgccaaggatttttcctgctgcgtcttgggcgccgaaagaaagccacactgcaagacatacaagccagttacagccgatggcggaaatgagaaccttgccaaagctcatatcaagctttccttgggcaacggcaatcgttttttctaaataaggacctgtttcagtcaatccaaccaaatgcccgaaaaagtacgcaacaaacaatgcgccgattaagttcataattgtgacgattccccagttaatcgctaactcttttactgatatttttctcgaaaataacgccattgcaactgacatcatattgcctgtgatcagttcagcgccagcgagtacgacaaggatcaggccgactggaaatactgctgcaccaatcaaactggacaggctcccccattctttcggaagatcgccgattaccctgatatcaagcaaatacccaagcgcgataaatgcaccgcctaaaaaccccagcacgagcagtgacggcagcgggagctttatttttttcatccctgcttcaattgctgcttccgctatttcatccggttttcgaaaagccataataaaacgcctccattacttcttcttttctcacagttatgcaagaaaggcaataaaaaaggcagcactcaaataacctgtgtcaaaccaggcgtttgaatgctgcctaacttgtatgcatacccatacaacaatatcaagcagtatgaagatattgaaagagaatatatacagttcgtgcatacattccattgctttagccttctataactgtagcaacatcatatcaaatgtgacaaatttgtgtcaatgacaaatatactagctttgcagaacttctttttgctcatctatttttcggtcaaaaacaaatacagatacagcgatgttttcctcaattttaatatcagaaaacaaatggactagcttagctcccatgagttcctccattccttccggtgtttgtttggaataaaggtcttgaattaggcttgtccgggccgcatgtaccatctctcttccttcaggcgtgcgggcgataaactgctcgcttgcactcagatttccatatagtgttgaaactgccatgttttctacaaatacagtatgaattctctcaggcccttttccgaacaattctttgcgaagttttcgaataatatcattgaattcatgaatttttttagacatgctgattaccccttccgatattgccttataaaggcttttcccggttcccctcaggacatttcacttggttaaaattttcctgccatattgtattataataaatatcacattataataaaagcagtgttgatggatttgtaataggatcttgttatgagtctatcgttttataaaaatcaaggattggtctgttagtaagacttgctagtgaactattccgccatgtgtgtttacaccttcttagaattaagggcaggtgtatctctatacatggctttttttgacttcttgaaagaaagatggaggggaatatgaatatgatggacgttaagtcgatcagtgtccgtgtagacggaacagaaattcaagcacgagcaggggccacaattttagatattttaaatgaaaacggaattgagtacccgcagatttgccacgtaccagaggttgacccgattcaaacttgtgatacttgcatagtagaggcaaacggcaagctggttcgttcatgcgcgaccgttgcagaaaacgggatgtctattgatctttcaggaaatcgagtgaaagaagcgcaaaccgaagcgatggaccgccttcttgaaaatcatttgctgtattgtacagtttgcgataacaacaatggaaactgtacgctgcataatacagcggaaatgatggggatcgagcatcaaaaatacccatacacgccaaaagaagatccttcttgcgcggttgatatgtctcatcctttttaccgctatgatccaaaccaatgtattgcctgcggccagtgtgttgaggtctgtcaaaaccttcaggtaaatgaaacactctcaatcgactgggagcgcgaacgccctcgcgtcatttgggatgagggagttccgatcaatgaatcttcctgtgtcagctgcggtcagtgtgtcacagtatgtccatgtaatgcactgatggaaaaatcaatgctcgggcaggctggttttatgacaggcattaaagaggacgtcatggaaccgatgattgatctcgtgaaaaatgttgaaccggggtatggcagcatttttgccatttctgaagtcgaagcggcaatgcgtgaaacgagaacgaaaaaaacgaaaactgtatgtacgttctgcggtgtcggatgttcatttgaagtatggacaaaaggacgggatattttaaagatccagcctgtttctgatgctccggttaacgcgatttccacatgtgtcaaagggaaattcggctgggattttgtcaattctgaggagcggatcacaaagcctttaatccgtaaaaacggagcctttgtggagtcttcttgggcagaagccctcgatcttgtcgcaagcagattaggatcaattaaagagcagtacggtaaaggctctgtcgggtttatttcttcttctaaaattacgaatgaagaaaactacgtcattcaaaaactagcgcgtcaggtatttgaaacaaacaacgtcgataactgctcacgctactgccagtctcctgctacagacggattgttccgcactgtcggcatgggcggtgacgccggcacgattaaagatattgccaaagcaggcctcgtcatcattgtcggtgccaatccggcggaaggacacccagtgctcgcaacacgcgtcaaacgggcacacaagctccacggtcaaaaactgattgttgctgacctgcgtaaaaatgagatggctgagcgatctgatctgttcatcagccctaaacaaggcacagaccaagtttggctgatggctgttacgaaatatatgatcgaccaaggctggcacgatcaggcgtttattgatgagaacgtcaattactttgaagattataaagaaacccttaaaacgtatacgcttgattatgcagaacgcatcacaggcctttcaaaagaaaacatcattcaaattgctgaaatgattcgtgatgctgacggcacttgtgtcctttggggaatgggtgtcacacaaaatacaggcggttctgatacatcagcagccatttcaaacctgcttctcgctacgggcaactatcgccgtccaggtgccggcgcttatcctctgcgcggacacaataacgtgcaaggcgcatgtgatatgggaacattgcctggctggctgccgggatatcagcatattacagatgacaaggcccgcgctaaatttgaagaggcatatggtgtcgagattgatggaaagcctggtttagataatattcaaatgcttcatgccattgaagaaggaaaaatgaaagctatgtatcttgtcggtgaggatatggcactggtcgattcaaacgcgaaccatgtgcatgatattttatcaagccttgatttcttcgtggtacaggacatctttctgtcaagaacagctcaatatgctgatgtcgtcttgccggccactccttcacttgaaaaagacggaacatttaccaacacagaacgccgtgtgcagcgattgtatcaggcgcttccgacgcttggtgacgcaaaaccggactggtggattattcaagaggtggcaaaccgtttaggagcgaattggaattacagccatccaagtgacattttctctgaaatggcgagtctttctcctctgtttgccaaagcaagctatgaggtgcttgaaggctggaacagcttcctatggggcagcttcacaggtgaaagcacaccgcttctgtatgaagacggatttaatttccctgacaaaaaagcccgctttgccctttctgattggaccgagccagcggcatttccggaggaatatgaccttcatatcaataacggccggatgctggagcatttccacgaaggaaacatgacaaataaatcgaaaggcatccaagcgaaagtgccgaatgtattcgttgagatctcacctgagcttgcacaagagcgaggtgtttgtgacggttcgcttgtacggctcgtttctccgttcggagcagtcaaattgaacgcgctgatcacagaccgggtacggaaaaatgaactctatctgccaatgaactcgacagacaaggagtcagcgattaacttcttgacgggccctgcagctgataaacggacgaacacgcctgcttataaacagacaaaggtccgcatggaagtgcttggcggctgtgaaacagcgccgcttccaaaaacaaatccgcgcaacaaaaaacggcatccgcaaaacggagtcgaagcagaaagaaaatggaaccgccctggctatgtacatctgactgattaaacgataggaggaaaacgaatggccactccgattacgacgatcaaaaaagaaacaaaaacagctgagcaaatgaagcttgaaaaaatagaagaactgaaagagctgctggcggaaaatgaggacgccgtctctaaaacgatgacgttaatgaatgaactcaatgatcttggaatttttgatgcggcaacaagcatgctcagagcgaaggaagacattgccaagattgcgcttggccaagtttcccgcgagcctgtcaccaacctcatcaacacgatgatggccgccggaggcgcattgacaaaagccgatcctgagtttacagcaaagcttttagaaagcgtaatggctgggactgaacaggcacaaagctttttaaaagaagacaagaaagtcgggattctcgacctgttaaaagcaatgaacgatcctgatatcaacagagccgtcggcttcggccttcagtttttaaaaggcatgggaaaagaacttcgagaacaataacagaaaaacagccatcgctgatgatggctgtttttttattcgtcggcttcttccaaacgcttcttgtaaataagtgaacggtcagcgcaaaagaaggcaccggctaaaaatacgcaatccgctaaaaacatcgtcgatttctggcctaatgttaaaccttgatcagggagaactgcgcctatatataaaaaagtgctgactgcaagcaatgtaaaagcaaaatgcttgtagtcttcttttaaagatttcattctatttttgttcaaaagaatcacctgccagattcatagtatacgactattataatataatccggcggcttacagagaaagtaattctatccatttgttatatattttcaagcgcttggccgatatcttccaacaagtcttccgcatcttcaattcctacagaaattctgatcaagccgtccgtaatgccgagctcaagccggcgttctctcggaatagaggcatgtgtcattcttgcaggaacagaaattaagctttcaaccgcccccaggctttcagcaatggtaaacagtttcagatttcctaaaaacgcatcaacccgttcttcactgccaatatcaaaggagatcatgccgccgaagcccgctccttgcgtttttgcaagctcatgtccgggatgatttgaagaaccagggtaatataacgtttggacagcagggtgattctcaagaaagcttgcgattttccgcgcattttgatcgatcgcttccattctgagtcccaacgttttgattcctctcattaacagccaggaatcttgagggccgagcacgccgcctgtggagttttgcacaaaatgcagctcttctccaagctctttcgaagctgtcacaactaaacctccgacgacatcactgtgtccgccaagatattttgtcgcactgtgcagtacgatatcagcgcctaaagtaagcggctgttgaaaataaggagtattaaaggtattgtctacgataagcagaacacccgctttttttgcgatatcagccatgagcgtcaggtcggtgattttgagcaacgggtttgtcggtgtttcaatataaattgcttttgtattagggcgaatcgctttttcaacttcttccctgctgctcgtatcaacaaatgttgattcaatgccaagacggttaagcacctttgtcatcacgcgatatgttccgccgtacacatcatcagtcaacacgacatgatctccgctgttaaacagcatcataaccgctgtaatggcagccattcctgagctgaacgcatagcctgcttccccgctttccagttctgtcacaagtgcttcgagagcggttcgagtcggattggccgttcttgaatactcgtagcctgtatgctgccctgctttcggctgcttgtacgtgcttacttgataaatcggcacggaaactgcgcctgttttctcatcacctgtgattccgccatgtatcatcaatgtttttttcttcatatcagatgcctccttcgtatatttgtttgctgatatatcgatcgctgctgtcaggaaatactgtgacaatgttagttccagcggatgcttttttcgcttcctccaatgccgcataaagcgctgcacctgaagagcttccgatcagcaggccttctttttctgccgcttctttcacaagtctaaacgcattctcatctgttacggtgtagatctcgtcaaaatggctcttatccatataatcggggataaactccatgccgatgccctctgttttatgagcgtggggctctcctccgtttaaaatcgagcccaccggttcaacaatcaccgttttgactgctggatttttttcttttaagaaggaagctgtccctgcgaatgtgcctcctgatcctgcccctgcgacaaatgtatgaatattcccatcaagcgcttcccacatttcaggcccaagcgtcttatagtaagtcgatggatttactcggtttttaaattgcaaaacgcaataagaattttcaatttcagtctccagctgaatggctttttgaatggcgccctgcattccgtcttgacgcggtgtatgaatgattgatgcgccaagcgcttgcataatttgctgtttctctctgctgaaatgttcagggacacagaaaatcgctttcagcccatattttctggcactcagcgcaaggccgatccctgtattgcctgccgtagcttctataatcactccgccgggtttcactttgcctgaatcgagcgcgtcacgaatcagcatatctcccagtctgtctttgatgcttccccctggattcatcatttcaagcttggcatacaccgccactccttctggaacatcaaagttcttcaagcggagaagcggtgtattcccaatcagctcggtaatgtccgtaatcactgtcatatatgtcctcctccttattagagggtgtttttagaaaaaacggaggagaacattctccccgttttaatgaattcgtttgatcacctttaacacaagctctgttgaatggacagccgcctgctctaaaaattggtcaaatgaaacatgtgattcttttcctgcaatatcagataacgctctgatgacgacaaacggcgttttaaattgatggcacacttgagccactgccgcagcctccatttcaaccgcatacaaatcagaaaatctcgtacgcacctcttcaacccgcttcggatcgttcatgaaagaatcgcctgttgcaatcgttccttttgcaacctgaatgccgtcgagttcagataccgcttcttcagtgatgctgatcagcttttcatccgccgcataagcagccggaagacccggcacttggccgtattcatagtcaaaagccgttacgtctacatcatggtggcgaacgtcagtggaaatgacgacatctcctacattcaatgtatgatgaaatccgccggctgagcctgtgttaataacataatcaggcttgtaacggtcaagcagaagcgtcgtgctgatagcagcatttacttttccaattcctgattttaaaagaaccacttcagttccttcatattcgcctgttgtaaattcacagtgtgcgatcgtttctgtttttgcattttcaagtttgtttcttaagatggtaacttcctcttccattgctccgatgactgctagtctcatctattcacattcccttcactttaccgtttgatcgcctccattatccacacgaagtcgttttgctgagtgaatcggactgcaaaaccttcagctgtaaacatttctttcaacgcatccaatgtaggataatgctctgtctctaaatcatttgcaagctgataaaagccttgagaacgggctttatcgatagcctgttgatacgcttgcgcatcttcaaagacggtatcggcaaacactattttatcatgcaagtgaaggtatttgccatattgctttatggcagcccgcttttcttcgtcagtcaaatgatgaaaagcatatgaactgacaattgtatcagcctgaaatggcggctcagggaatgtcaggaagtctccatcaacgatttccgacctgcctgaaagcttgtcagaagccagtttacgcattgctggagaaggttcgattccaaatacagttttgcctgcatcgagcagcttagccgtcaaattccctgtccccgggccaaattctaacacatgcgttccagatttgctgacgatggcatcaaggatatgatcatagcctctgaacgcttctttatactgaatatctaaaccttgtactgtttgatcataagttgctgcccaatcttcaaagagagggataaattcacgtcccatatttgtcacactccatatttaataattcctataagcatactatgaattaatgatggaacagttcctataataccacatcttctgaaaagcaggtactaaaacactttgtgtattttatgccatctcatattgcgcattgaccgcaaaaaagcttatacttcaaatgacttgtgaaagctggagggtcaagatatgaattttcaattagatctgattaaagacaaagtggaattttttgaagcggcttcattgcaggagcttgaaaagaaaatcaatacacaaattgaaaacaataaagccatcatgctccgggtgaaatctgtttcacaccaaactgctgtggcagaaggaagaatattgtacagcgcggtggttcatttcgcagctgaagcctaaaacaaaagcagccggttctaacccggctgcttttgtttattttagcttttctacttttgtcggcttccagccttttttatcaacccatgtaatcgtgacttgatatttattcccagtcgccttgtccaaaatcttgcctttagcatcctgagggctgccgttatttccaagccagagcaccgtcatgttatctgttgagacaccagttgcgtatgaaatggctttcagcatctcagcccagtcttgtgagcttgaatcataagtagcggcatgctcgccagcctgctcagttccgactgctttccagtcaggattttcatacgttttttccacatcgctcgatgagccgccttctgttacttttgcatctttaagcccgtcaccggctgaatctgagcttgaatctgaatcagagtcatcttttttagaagaagaatcatcttttttggaatcagagtcagaagacttctcagaatccttttcgctgtcagatgtatctttcttgctgtcttttatatcctcatccgatttcttttcagtctttcctgaagccggagattcctgtttttgcgccgtttcagaatccttgctgacatctttgctagaaggactgttaatgaagagattcgctgctactacgacaattagtatggatacgattgcgattaaaatgttaagcactaaattggcttttctgcgtttatcacgattttcataacgagattgattattgctcaataattctgcactcctttatccctcttggctcagcatatattttaacatgtgctgagaagttgttctatttctgattgatttcaatttcgtgtacttttttaacaatatcataaaacaccgaatttgtcagagccttatctcccggtgtatccatgtgtaaaacaaccagagcgtatttcggcttatccgcgggaaaatatccggcaaaccatttttcatagagcgtttccctctcttttgaaagcttgcctgtttgggctgtgcccgacttccctgctacagtatacggaagatcttgaaaccttctgcccgttccggaaggagattctaccacccgccgcagtattttttgaagctgctgtgacgtatatttgtctatcgtttcccctttgagcttctgatctttaaacgtaacgagcgttgtgccgttcttatactcaatttgttcggcaattttcacctgccgtttttctccgccgcgggcgattgtcgccatcatattggctacctccagcggcgttacctttacgtttttctgcccgattgctgtttgcgcaatggcttttttgactgatttgtctttttcatccccccaaatcacgccgcttttttcgttatacagctggcggaaatcggtttcgtggtacagttttccctcccagcctgcccgatcagtgagagccagcttctcggacatatcttcaataaccgagctgtcttttttcattaattgttctgcaagactcgtaaatgtgtaattacagctttgggcaaaactttcatcaaaagacaaggttcctttgtcgtcccccggttccccgtacaggtttaaattgcaattaaaggtttgactaggcttcaccatattattttcgattgcagctgcggcaatgactgttttaaaaactgatccgggatagattggcgtcagcatataattttgaagtgtgttttgccgggacacatctgcatctggtttgcttacaatccccagaacactgctattttcgatgtccagcagcacagctcctccctttttcagcccctgttcatccaatacctcctccatcgctttttgaatgctttgatcgatcgttgttttgacctggagcggataaaatgtattggcttcagctgtatatttgacgtccatgccaaacaaagggtttccttttccgtccacatgatataaaagctttgtgtcttgttccggaagcaaaaactcgtcaaatgtccgttctaaaccggttgttccgatttctgttgtaatcggaaggctctccttgtcaggatatttcttgcgaagcagcgccggatcttggttcgtgctccctatcgtatgtgaagcaaggctgggcttgtcttcattctccatatatacgccgtaaatgccgggatatttcaaagaattgatttttgtgatagattgttttgaaagtgttttgattttcttttgctgcaaaatgaccggtttttttgcctgacctagtgtctggcgcaaatcatcttcagacatgccgaggatgtccgcaacttttttgatcggccaatcctgcgtcagcagaaaagggaacaaaacaaccgcaggctcgctttgtcctgtcagcgcccgcccgtttcgatctaaaaaagagcctcttccatctgaaatgagcacttcctccgtccgctgtttcacactttcttgaatcaaattaattttctttttagaaaatgattctgtgaaaaacagctggatttctgcaagtctcagcagaagcagaaaaaatacaatcaaaaaagcgatgactgccagcttcattcgtttcgatatcttcataaaaaaaacacctcacccacattgtggacgaggtgtttcgctgctaaacagatattatgaaattttcacaattttcacgagcatttctccgcccggtgtttgtactgtgacttcttcatctacttttttgcccaagaggctttttgcgatcggtgaatcgtttgagattttcccttcaaacgggtcagcttccgcgcttccgacgatcgtatatgattcttcatcaccgtcaggcagttcgacgaaagtgacggttttacccaaaccgacaacgttagagccgccgtcatcttcaatgattttcgcattgcgaatcatattttcaagagtcgtcacgcggccctctacaaatgcctgctcttctttcgctgaatcgtattcagagttctcggaaaggtctccgaagcttctcgcaattttgattcgctctactacttcttttcgtttaaccgttttcaaatattctaattcttgttcaagtttttgttttccttctgcagtcataggaaaaactttctcttgtgccatgtcccttcactccttctggttgtccctcaacatcttcgattatgtatgagagcataaactaaaaaatacaagaatgagaacacagggcagtcctcgttcttctctcccatataggtactgtttatcttaaactgaatcgtgtcgttctgcaaatatttcgcgtttataaacagggaaagaagggaattcgcacattcccttcctgcctatacataatatggtcagagttatttatgtctatgctatggtattacaaaatcgcgttttgttcaagaatggtttgaatttttgtgaccatcagatcaattgcgacgtgattctgaccgccttccgggataataatatcagcgtatcgtttcgtcggctcgacgaattggttatgcatcggacggaccactgacacatattgttcaatgacagaatcaatagagcgtccgcgctcattaatatctctcataatccgtctgatgatacgcaagtcagcgtccgtatcaacataaagcttgatatccatcagatcacgaagccttttgtcttcaagaacaagaatgccttcaaggataataacatcctttggctctacgtgaaccgtttcttctgaacgtgtgtgaagcttatagtcataaatcggcttttcaatcgggcggtaattcaatagatcttgaatatgctcgattaaatagtcattatcaaacgcaagcggatgatcatagtttgtgttcagcctttcttcaaacggaagatggctttggtctttataataaaggtcctgctggatcattaaaattgagtgtcctttaaactgttcataaatggaccgtgtgacactcgtttttcctgaaccggaacctcctgcgattccaatgactactggattcttacccatgggctgttacttcccctttctcatcatgttgctcggataaatctttttgtctagtttgaatttgacaatttgcaggggatggcgggcagcatctagctcatttccgtcttcgtcccaaatggtttcaatcgtatgtgtaaagttttcgatttctggaccgaaaaattccacttcgtcgccttttttgaagaaattgcgctgctgaagcgtgaccatttgtgtatcttcatcataattcagcactaagccgacaaaatcatatgtcgttttcttggcgtgttcgccgaacatttgctcttcatagcctggcgttccttcaaagaaagctgtcgcagtgtccctgttggcgcacttatcaagctcttcaagccattctttttgaatcacaaagttttctggatcagcgcaataagcatcgattactttgcggtatacgctgacaacagttgctacatagtgaatggatttcatgcggccttcaatctttaagctgtcgatccccatttcaatcatttttggaatggattcaatcagcttcaaatctttcgggctcatcgcaaatggtgcatcttcttcaccatacaaagcaacggcgttggcaccgtctgtttggtagagatcataatcccagcggcatgactggcagcagcctccgcggttggaatcccgcgctgtcatgtgattgctcagcacgcagcggccggaatatgcaatacacattgcgccatgaatgaaggattcgatttcgatatctaccttttctttcatttctctgatttcaagagcgctagtttcacgtgccagcacgacgcggtcgagaccttcttccttccagaactggacagccttccagtttgaaagagactgctgtgtgctcaagtgaacctcaacattcggcgccactctgcggcatgtttcaataataagcggatctgccacaataataccggcaacgttggcgtctccaagcgcttttaaatagtcttcaagcccgtccatgttttcattatgagcgaaaatattcgttgttacgtagatcttcgcgccatatttctttgcgaattcaacgccttctgcaatttcttcgatcgtaaagttatcggcattcgagcgaagcccgtattcctgtcccccgataaagaccgcgtccgctccgtaatgaacagcgattttcagcttttcaagattacccgcaggtgcgagaagctccggctttttcgtaatcacacgctttccattaacgattgtggatattttatcatttacggcagtcatagcttaacctccttttgattaataaaccgtttccttgaagaagaatccggtatcaatttttctgtttactggctggatgctttcaatgcgttcgatccagtcttcttttttcgcttcgtattcgtcacggttttccacgcacaaatcaattgcttctctgtacattttggtgacttctattaggtattcaggcattttcaaaacaccatcgattttgaaagaatcaattccggcatctatcaattcctcgagctcatcaatgatgcacacatcgttcgggctcatgatgtgagtgccgttttcatcttcgaaaatcggatatttattatcgcgttctttatcgtgtaaaaacatgcctgattcttttttctttctttcaatgtccatgactttgccctgatattcaaaatagtttccaatcaaagaacgcttcgattggaacatgcacgtcattccatgcacctggatttcaatttcgacttcagcattttctttaatctcaacaatgctgtccatgtttaattctctggcaagcacagaacgcgccgcacccttgcgtccccagtagttgcatgtataatagttggtgcctgtcgtttctgtgctccaatgaagcttcagatcaggcgcagattcacgggcagccatcagcacggcaggatcgccgaataccgctgcatcgacaccggcttctgctaagaaagccagatattcgccaagctcacccactttatcattatggaaaattgcatttacagcaacgtatacttttgccccttctttgtgagcaatctctacggcttttgttacatcttcacgagaaaattctccggctaatctcaagccgtatctctgttccccaactaaaaacgcagttgccccagcctgtatgagcggcaaaatgtccgctgtactcgtcggcgtcactaagagctctggttttttcatgacgttcacctcttctttttactaatcgcaagtccgtccccgacaggaataatcgcagtttgataatccggatgattcatcagccaatgattatattcatcaattttggctacaagcctgcgccttctcttcggttctattttgctgtaatcctctgccaccagacctttaaacagcacgttgtctgttataatcaccccgtccggtgaaagcatcggttcatataaatgaaaaaagttttgatactgaccttttgcagcgtcaataaaaatgacatcgtaaggcgcggttacatgaacggcgtcggctaattcaagcgcatctccgtaaaaaacatgaatccggtcatcaagctgaaattccttgatattgtttaccgcttcttcatgccgtttctcattgcgttcaattgtatatatttcagcagacggcagttccagagccattcgaatggctgaataaccaatggccgttccgatttctagtatttttttcggctgtttcacagacaaaatttgaagcagcacctccatgcccgctttttccataatcgggacatgatgttcttctgcatatgcttcaagtctcttcacgttatccggccgaggctttaataatgcttctatatagtcatttatttgttcataccggtcagtcactacaaacagcctcccgttctaaaaaggagtgccccagtcttatgcgcaggacactctctgaatacatcatgatacatcggtaaacaacccgatatattttatcataaaaccttgcggaaagcgaacaaaaggagagctttttgctctccttttatttctcattttttgaggaaatgtatttttcttttgctttattatgctcttttagcgtttttgtaaatacgacctcaccatttgatttggccaagaaatacagatagtccgttttatccggatgcagcgctgcttcccatgatgacatgccggcattggcaatcggccctggcgtcagccctgtgtttttatacgtattgtatggtgaatcgatttccagatccttataaagaacccgatctttatgcttgcctgccgcgtacaggacggtcggatctgtttggagcggcattttctttttcaggcggttataaaagacgctcgcaattttatggcggtcggctttttcagtcgcttcttcttctatcaaagaagccattgtcagcagcttatgcacagaaactttgtttttcttcatttctgatttatatgtttccacataagaatttgtctgcttaatcattgccttgataatgtcttcaagtgatgtgtccggatcgttaaaagggtatgtagccgggaataggtacccttcaagcgggtgcttaatgtttttattgaaaacatcatttgtcacagtgtccgggaattctttcttcagctgattgataaatgtttcatcgtccagcttcgctatgacttgttttttagagtattttgtttcatcagcaatagcagccgcgatttgggtcagctgtgctccctcagtcactgtgatttgaaaagcgtaacctgtagccccgcttgtcagcttctgaataatggcatctaaatccatacctttattcagatggtagaatccggcctgaaacccggaagcacctttatatttcacatagtactgaaacgccttctcgctttttatgacatcatttttctttaatatcgatgcgatggctgaaacagacgaaccgctcggaatgttaatattaactgtcgttttactgtctttttcaacaggttcaagcaatgatttcccatataaaaatgccccgccaatgatgagaaacagcacaacaatggaagacagtatgattctttttttattaaaaaacgattttttttgctgattgatatacattaggtctcctcccatcagctcttatactacatgattcattgtatttcggcaatttattacaaaaagaggcctgcataaagcagaaaaaagccggagcagtatagctccggctttggtttggcgcgatgttttactcttcgtcttcgtccgctaagaatgtgtttagtgtttcttcgatcatatcccattcttcgtcagtttcaatcgggaatagctcaccgttttcaccgtcttcgtttggcgtgaagctggaagcaagaatttctacttcttcgtcatcttttgattcgattggatagtacaagacataagatttgccaaactcttcattttcaaatgtaaacagcacttcacaaagctgttcatttccttgatcgtcaacaattgtaatatttttttcgccgtgttccattttcttcacctctggctttaatttaagctgtcaagatatccttgtaaaatcataacagccgccattttatcaatgactttttttcgtttttgcctgctgacgtcagctgcaatcagcattttttcagccgccattgtggtaagacgctcgtcccacagcacaacaggaacattgtacgttgtttcaagcactttcgcaaatgtttggctggcttcgcctctcgggccgactgttccgttcatgttcttaggaaagccgagcacgattttatctatagtatagtcctttatcagttcagataaacgggataaaccataatcgccttctgcttcatttatctttatggtctcaatgccttgagcagtccagcccatttcatcgctcagagctacaccgagtgttttggttcctaaatcgagtcctaatattctcattctttatttacgcctctttatgctgttctaaataagactttaccaattcctcgattaattcgtctctttcaagtttgcgaattaaattgcgagcgtcacgatgcctaggaatataagcgggatcacctgacagcaagtatccgacaatctggttgattggattgtagcccttttcctgaagcgcgtcatacactgtaatcagcacctcatttacgttagtctcagcagaatcatcggagaaattaaatttcatcgttttatcaaacgagctcaccgttttgcacctctttcccaaattcgcaggcaaagttcagcctggggtcctaatcttaccatcattctacactacatgggcgaattataaaacggatttcacccaatcttctacagaagccaaagcttcttctaatttttccggctgtttaccgcctgcctgcgccatgtccggacggcctccgccgcctccgccgcaaacttccgcagcttgtttaaccagcatgccggcgtgaagtcctttctcaatgaggtcctttgtgactccggcagagatattaactttatcgttttgtaccgcaccaagcacgatcaccgcagagccaagctttgctttgagttcatcgaccatagtgcggagatgattcatgtcttttgcatttacttttgccgcaagcacgtttacgccgtcaacttcttttactttcgacaggattgctcctgcttccacgttgcctagttttgcaagaagagattcattttctctttgtgcatccttcagttcagcctgcagagccgcgacccgtttcggcacttctttgatatttgttttcagctcgtcagcggtctgcttcaatacagaaatctggctgttcatttcgacgtaagcgccttgtcccgttacagcttcaatccgtcttgtgcctgctccgattccggattcagaaacgattttaaacaagccgatttctgctgtatttctgacgtggcagccgccgcacagctctaagctgtaatctccaacttgaacgacacggacaatatcgccatatttttcgccgaacagtgccatcgcacccatttcttttgcttcagcgatcggtttcaaatcaatgctgaccgggatgctcgcccagatcttttcgtttacgattctttcaatttgttcgagctcttcttttgtcacttggccaaagtgcgagaagtcaaaacgaaggcggttttccgttacaagagagcccgcctgattgacatgagttccaagaacatcttttagagcctgatgcaataaatgcgttgccgtgtggtttttaatgacgccgcttctcatatggtcttcaacttcagccgtaacatgcaggcctttttgaacagtaccgctctccacaacaccttcatgcacatgctggccgttcggcgctttttgaacatctttaattcttacaactgcctgctcgcttcggagatagcctttgtcgccgatttggccgccgctttctgcatagaacggtgtttcatcaagaatgatttgaacgctttctccttcatgagcctcttcgattaattggccgtcctgaagaagcacaatgatattggcatcagctttggtttgagagtagccgacaaatgtgctttcaactgtcacgtcgcgcagtgcgccgccctgcacctgcatgctgccgacatcctggcgggcgtttcttgcccgttcacgctgctggttcatttcctcctcaaagccctcatggtcaaccgtcatgttctcgtcttctgcgtattcttcagtcaattcaaccgggaatccatacgtatcatacagtttaaacacatcagcacctgagataacgctgctgcccttgtctttttcttttttgatcatttctgacaggatcgcaagcccttcattaagggtctcatggaagcgttcttcctcggttttaatgacttttgcgatgaaatccgctttctctttcacttcaggatagaaatcagccatgatttctgcgacaaccggcactaaatcaaacatgaacggacgatggatgttgatcgttttggcataacgcacggcacggcgtaataagcgtcttaatacatagccgcggccttcatttgacggcagcgcaccgtcactgacagcaaaggcaaccgttctgatatggtcagcaatcactttaaacgcagtgtctttcacattgtctttgccatatgtttcaccagaaatcgattctgttgctttaatgatcggaacaaacaaatcggtgtcaaagtttgtcggaacattctggatgacagacaccattctttcaagacccatgcctgtatcaatatttttctttggaagcggtgtgtacgtgccgtcagggttatggttgaactctgagaacacaaggttccatacttccaggtaacggtcgttttccccgcctgggtaaagctccggatcttctggatcattaccgtatgcttcaccgcggtcgtaaaagatttccgtattcggtccgctcggcccttcaccgatatcccagaagttcccttccagacggataattctttcttcaggaataccgatttttttcgcccaaaactcatatgcctcttcatcttcaggatgaaccgtaacagagagaagctctttgtcgaagccaatccacttgtcgctcgttaaaaactcccaagcccatgtaatggcttcttctttgaaataatcgccgatggaaaagtttccgagcatttcaaagaaagtgtgatggcgcgcagttttacctacattttctatatcgtttgttctgatcgctttttgagcgtttacgattcttggattttccggcacgacacggccgtcaaaatattttttcagcgtcgcaacaccgctgttgatccaaagcagtgaaggatcctcatgaggcactaatgacgcgcttggctctaccgcatgtcctttttctttaaagaaatccaaaaacatttgacgcacttccgcagaagttaagtgtttcattgtatttcctcctctataaaaatcgaaattctcttcagtgacagcaaaaaagccctccccctatgcaaaccaacgtttacacagggacgagagctgtctcgcggtaccaccctgattacgggcattcatgcgcccgtcacctttaaccctgtaacgcaggataagcggcagtgattaactgcactcaggattagcttcctccgatcttctgataaagctcctttcagcttatggagcttctctctttaacagggcttcggcgtactcagatccgtcactcgagattcgtatgtattctacgagaaattatagacaagcggcacgccgatgtcaatgctccgtcctcatccgcaaaaaatggatcatcattacttttaaaacagccgtcgcaggaacagccagaatcatcccgacgatacccgcaagctcccctccggcaaggagtgcaagcatgataacgaccggatgcattttaaggcttctgccgacaatgaacggactgaggatatttccttccataaactgcagaataaacaccgtaatcaccacaacaagaaccgccttgactgagatcgtcatcgcaattaacaacgcaggaacagctccgatgaaagggccaaaatacgggatgacattcgttaccccagagataaggccaagtatcagcggatacggaagcccaaatacccagaacgaaatgcctgcaatcacgccaagaatcaagcagaccaaaagctggccgcggatataatcgccaagcgaatcatccacatcccgcaaaaaggcgctgccccgctttctccacgacttcggagtcaagtaccatactgtctttttcattaactcaatgtccttcaccatataaaacacgagaaaagggattgttgcagcaattaagaagtaatcaagcacattgcggatcccgctgatcgcaccctcgatcgttcccgcaaaaaacgcctccgtctggcggatcattttatctatacggtgatgcataccatcaggccagtcatccgtatggttatgcacatgaagaagaagcccgttatacgtttcggcaaacatgggtatattttctgacaaatccgtcagctgcacgattaaaacaggcacccctttatacaacgcccagccaatcccgccaaaaaaaagaacataaatgaccaagatgctcaaagtcctaggcaatcctttgccatgcagccattctgtgaccggaagcaataaataagatataaaaatagaaatgatcaagggaataaagatcgtttttatgacgagccaaaagggtgaccataacatatcaagcataaaaaagacatagactgttaacagaaccagcaaacaaatagccacccacaacaaaagctgcaccggtttttggagcatctgctttcacctcacctatatcttttgaggtttacaaggaattattctttatgtttctttagtcagtcagaagtcatggacattttttcacttttaattttcagaaaagtttgatcatttactttttggtcaaattttctgataggaggattgcgatgatcacatttcaaaatgtaaacaagcattacggagattttcacgtgttaaaacaaattaatcttcaaatcgaaaaaggtgaagtcgttgttatcatcggcccatccggttccggtaaaagcacattgctcagatgcatcaacagacttgagtcgatcaatgagggagtgcttacagtaaacggcaccgccattaacgacagaaaaactgatatcaatcaagtgcggcaaaatatcgggatggtgtttcagcactttcatttatatccgcataaaacagtgctgcagaacatcatgctggctccggtaaaagtgcttagacaatcacctgaacaagcaaaggaaacggcgcggtactatcttgaaaaagtcggcatcccagacaaggctgacgcctatccttcccagctttccggcgggcagcagcagcgtgttgccatcgcaagaggactggcgatgaagccggaggtcatgctgtttgacgagccgacatcagcacttgatcctgaaatgatcggtgaggtgctagatgtcatgaaaacactcgccaaagaaggcatgacaatggttgtcgtgacacacgaaatggggtttgccaaagaagttgccgaccggattgtcttcattgacgaaggaaaaattttagaagaagcagtgccggctgaattttacgcgaacccgaaggaagaacgggcccgcttattcttaagccgtattttaaatcattaaaacagaaatggggagcttgtatgaaaaagattttttctttagcattgatttctttattcgctgtcatcttgcttgccgcttgcggcagcaagggatcaaacggagaagcctcaaaggagagcaaaaaagatacgctagccgccattaaagacaatgacaaaattgtcttcggcgtaaaaacggacactcgactgttcggtcttaaaaatccaagctcaggtgagattgagggttttgatattgatattgctaaacaaatcgctaaagacattttaggtgatgagaaaaaagctcaatttaaagaggtcacctcaaaaacaaggattcctatgctgcaaaacggggatatcgacgccattgtcgccacaatgacgatcactgaagaacgaaaaaaggaagttgacttttctgatgtctatttcgaggccgggcaatcgcttctcgtgaaaaaaggcagcaaaatcaagagtgtcgagaatcttggcaaaggctcaaaagttcttgcagtaaaaggctccacctcctctcaaaacattcgtgaaaaggcgcctgaagcatctgttttagaatttgaaaactacgcagaagcctttacagcccttaaatcggggcaaggcgatgccctcaccacagataatgcgattttatatggaatggctgatgaaaataaaaattatcaattaacaggaaagccttttacagatgagccttacgggatcgccgtgaaaaaagggcaatctgctctcgcgaaagaaatcaacgcttcacttaaaaagatgaagtcggatggcagatacgatgaaatttataaaaaatggatcaaagaagacccagctgaataacaaccatcccgggatgagcaggcgatgctcatcccaatttgataaggagtgaataggcagatgaatgtgtcaattcttttcgataacttcagcatgtatatggacggtttttaccataccttgctcgcaagtgttatcgcgctggccggcagttttgtcctcggcgttgctgtagcggttatgagaataacagtctttaagccgctgcaatggctcgggaccgcatatgtagaattcatccgcaacatccctcttcttttaattacctttgttttctatttcggacttccaaacgcaggcctgaggcttgacggttttcaagcgggaacggttgctctcaccatttatacctctgcgtttatcgctgaagccatcagagcaggcatccagtctgtttcaaaagggcagatggaagcggcacgctcgtcaggctttacctacagccaagccatgctccatatcattttgccgcaggcaatcaaaatcgtcattccgcctttaggcaatcaatttttaaacttagtcaaaaactcttcgattcttggggttgtggccggattggatcttatgtaccaagccgatttagtttcgtcgagcacactcgttgtatttgatgtttatatttttgtggcgcttttttacttagtgctgacgattccgcttagcatcggtgttaactatctggaaaaacggctggaaaaaagctattgataaggagtgagttacattggatttcatcggtgcttattcacaggagcatttagcgtttttatgggatggctttctcgtcaccttgtacgttgctttcatctccatcattctgagctttttcttcggtttaatcgcaggcaccctgcgttatgcgaaagttcccgttctttctcaattgattgcagttctcgttgaaacgatcagaaacctccccttgctgttaattattttctttacgttttttgcccttccggaaattgggattaagcttgaaattacagctgctgcaattacagcactaacgatttttgaatccgctatgctatctgaaattatccgaagcggactgaaatcaattgacaaaggacaaattgaagcggcgcgctcctccgggctgagctatacacagaccctgttctttatcgttatgccgcaagcgcttcgccgcatggttccgcccatcgtaagccagtttatttctttattaaaagatacatcgctcgctgttgtgatcgccctgcctgaactgattcacaacgcgcaaattattaacggccaaagcgctgacggcagttattttttcccgatctttttacttgcggcccttatgtatttcgcagtcaactacagcctttcactcgcagcaagacgcctcgaggtccggcaaacatagaaaaggatactctttggagagtatcctttttgcattaaaacattttcgtaattcttcttctcatccgcttcatgcttcgattattcagcatgtcagattgagtcgccattcggtacacgagagctccggctcccattgccaaaagagaagtcatcgtccgattcatcctgcgcatctcctttcatgattaaaaattgatgctgcgttcatcctcagaaaacaaatcatccaagctgcttaacgttccgtcttcttccacctgatgagttgcaatcttccctttcgccactgtcagttcaataaaacagccccagcaataatattggttcacgccgattttgccgatatccttacttttgcaattcgggcatataagcatacctcacacctctatccgttcagaacgatctcgtctttccgcacctcgacaagcgaatccgctctttggatctggcgcttgcttcccgcaaggtcagaaaagaaaccgtccgagagttcatatgctacgattatgcccctgtccaaacaaaagtatacatcttccagcatccccaatatatcgccctcttgcgatttcacaagcttcatcttcatctgctcgtatgtgaagcatgatttcggaagaggcaaaagctgttctgaactgaccgaagccaatatgcggtcatcaagaatggaagagatatcacacgcccgtaatagcgcatgatgatgatgcaaaaagcgtttttgtgcaagaataaacccaagacaatctcctttcagagaaaaacaaatatcggaaattgccccgagataacaagaagttcgttctgagtatactgggaatccttctacttcatggcatgttctcaaagtgtgatcaaccaccttttgttgaacaggcttaggttttgctttgcgccttagactcatacgatgaaatcaattccactgcaaatgaaaaaaactcccgcttgcacgggagcattttattgctgttcttctttcataaaatcgaatggtgtaatgccttccatgccaatgttggcgtcgtgtacgctgaacgggagctctttttggagagcctcaagctcggcatccatttcctcaacctgtacggacagcctgttttttaaggaggtctgtctgacagttgcatcattatttttcacgccccactccagcgcctcctcttccccgcataaaatgagaaatttcttcgctcttgtaatcgcggtataaagaaggtttcttctgagcattctataatagcctttcacaacaggcaaaaccacaatcggaaattcacttccctgcgatttatgaatagaacagcaatacgcatgggtaaattgattaaaatcttttttcgtaaatgtcatttcattgccgtcaaaagaaacgacggccatgtcttctttttctgtattttcctttgcataaaatatcgacgtgatttcgccaatatctccgttgaacacattgttttccggctgattgacaagctgcaaaattttatctccggttctgtagacaacatccccgaacttcaattctctccgtttttctttaggaggatttaaaatgtcctgcagcatcacattcaattcattaatgccggcttttcctctgtacatcggagcgaggacctgaatgtcctttgctgtatagccttttttcaatgcattggcgacaaccttctcaactacttctttgatttgcgacccgccgcagcgaataaaggaacggtcctttgtcggggcagtcaaattgttcggcagcaatccatttttcatctggtgggcaagctcgacgattgatgacccttctgcctggcgatagatgtctgtcagtctcacagtcggaatcacctgggatgccagcaggtctctgagcacttgtcccggaccgacggaaggcagctggtcttcgtctccgacaatgatgatttgtatatgatcagggatcgccttgaacaaatgattcgccagccatatatcaagcatactggcttcatcgataattaacagcttcccttcgatcggctgatcctctgtatgagtaaagccttcagcaccgttccagccaagcagcctgtgtatcgtaactgcaggaagtcccgttgattcactcatccgttttgctgctctccctgtcggagcggccaaaacaatcggaaaagcttcatcctttttataagctgacggatctagtgacacaccgtgaagctctccgtagagctcgacaatccctctgattaccgtcgttttccctgttcccggaccgcctgttaaaagaagcatcggcgaggaaagggctttttgaatcgcttccttctggctgggggcatactgaacgttcatccgttcttccagttctcccaacgcgagcaaaaactctgattcgggaaactggttctcatattcggtttggctagcgatatgtttcacacgctttgcaacgttttgttctgcgtaaaacagcgaaggaaaataacagcggccatcttctatgacaatgtctttattttctccaagggcaataatcgcgttagcggcatccatttctgtgatgcgctgcccttcccttgctgactggtttaacagagattgggtgtcaatgatcagctgttccgtttctatgtacgtgtgcccctctgacagacaagtcgtttcaagcgtgtacaaaatagcagcttttacccgctcaggatggttacccgaaagacccattctgctgcccagctcatccgctttcccaaacccgatgccttctacatccttcacaagctgataaggattttcctgaatcttttcaagcgtctcagattcataggcttgatagattttcatagacagctgcgggccaaaaccaaactgattcaaggaaatcatgatttgctccagtccctgatgccgctgcaatgcgccagccagcgtgtcggctttcttttttgagagtctgggaacatcataaagcactgaagcgtcagccaatattttattaatggcgctgtcgcccagctttttcacaatttcttcagctgtttttttgccgatcccctcgaataaatcactcgataaatattgaatgatgccttccttagtcgttggaatctcctttttgaaatgctccgcctgaaattggagcccgaattttggatgagttacgatctttccgtaaaacgtgtaggtctcttcttcttgaagcgcagggaagtagcccgtcacggatacggctttatcttcaatggcttcggaggtctctgtgactttcactttcagaaccgtatataaattggtgtcattatgatagatgactgtgttgactgtcccttttaaatagggctcttcctccagtttaagctgatccggatgctgctgcacgagctgtccctcctcctgtgcctgttatgatggatcaatcagttttttagcatgaagcgcaagcatatgatctggctggatatcgattgccttgtccagcatttccagcgctttttctcggttttctttataagcataagcgacaccggcattataaaatgcatctgcatgccccgggtcttgctctgtcacagctgagaattggctgagcgcttcgtccagcatgccctcgttggctaagcacatcccgaattgaaagcgcgcttccgtatcgttttcattcagttcgactgctctttgtaaatatggcagtgcaagcttaggctgttcgagcttgacaagcaccgttccgagcatgtaaaacaggtcgccgttttccatccccgcacgaagcgctttttcaaacatgtctttggcttctttgtacatttcttttacaacatagacatttcctgctccataataagcagtggctgcgctactgtctaattcaagcgctttatcataaaacgcaagcgcacgttccagctcgtttacggatgaaagaaggttggcaaaattgatatacggaatcgcgtcttctttattttcttcaatcgcttttgtaaatgcctctgccgctttctcgtaatcgccttcctgcatcgcctctataccgagttgattataatccaccgatcatcttcctttcattaaaaaaccccaactcagtgttgaggtttttcatcttttatacgtaccacaattttgttccgtctttgtacacatcatcaattgtcccgccgccaaggcattcttcgccgtcatagaagacaacggcttgtcccggcgttacagcgcggacttgttcatcaaagatgacttccgcttcaccctcgccagtcatgcgcaccgttactttatgatcttcttggcggtaacggaatttagccgtgcaggaaatctcttcgcccttcatgatatccgaacgtacccagctgatatttgttgctgtgattttgtcagaatataaaagcgggttatggaacccttgatccacgtagaggatgttcttttcaagatctttgcctaccgcaaaccacggctcgccgcttccgccgatgccaaggccgtgacgctgtccgatcgtatagtacatcaacccgtcgtggcggccttttacttcgccgtccatcgtcatcatatcgcccggctgtgcagggagatattggctgagaaacgttttgaagttgcgttcgccgataaagcagatgcctgtactgtcttttttcgtcgccgttgcaagttctgcttctttggcgatttcacgcacacggcttttttgaagttcgccgatcgggaacatgactttgctcagcgtatcttctgtcagctgattcaggaagtacgtttgatccttgttttcatcaatgccgcgcagcattctgacttttccgccgcttctgtctactcttgcatagtggccagtcgctaaatagtcggcgccaagtgacaatgcatgctccaaaaaggctttgaatttaatttctttgttgcacaatacatccgggtttggtgttctgcctgctttatattcatcaaggaagtattgaaataccttctcataatattgcttttcaaagtttacggcataatacggaattccgatttggttgcagacgcggatcacatcttcataatcctctgtcgccgtgcaaaaaccgttttcgtccgtatcatcccagtttttcataaagattccgattacatcatagccctgttcttttaacagcagggccgccacagatgagtctactccgccggacatgccgacaacgactcttgtatcctccggccgtttttccatttcattcactccaattactacgccgccttattgtgtcagccgtttgacaacgtcggccacatgtttggcagcagttttcacttgctcagccgtattgccgaggccgaagctgattcgaatagaggacgtcagccggtcactctcttcgccgaacatagcagtcagaacatgtgacggcaggactgaaccggccgtgcacgctgaaccgctggagacagcgacaccagccatatcaagattaaccagcagcgcttccactgacacaccggggaaataaagattcagaacatgcggcagactatgctctttgtccccgttgacctcgaatgccacacctgcatctctaagcgtgtcggcaaagattgctttaaacgattgatacttctcgtttttttcgtcacgttcttcacttgacagcttgatcgcttctttcagcccgacaatgcctggaacattttccgttccggcacggcgttttctttcttgctctcctccgaataaaagcggtgaaagcttcacatctttactagcatataaaaagcctgtcccttttggcccgttgagcttgtgcccggaaacagacagaaggtcaatatggctgtttttcacatcaattggcagcaacccgaatgcctgaacagcatcggtatgaaaataagctttgtgttcctttaacagctcaccgatttcttcgatcggctgcactgttccaacttcattatttccatacatcactgtcacaaggattgtatcatcacgcagtgcttctttcacctgttttgcactgactcttccattttggtcaacgtccagatacgttatgtcaaatccgtcttcctcaagtttttcacatgtgtgaagcacggcgtgatgctcaatttttgttgtgatgatatgtctgccaagatcttttcttgcaagtgcggttcccatgatcgccaagttatcagcttccgttcccccgcttgtaaaaatgatctcctgctctgccgctccgatttctgctgcgatctgcgctcttgcttcatccacccattttcgagattctctgccaaatgaatgaatactggagggattaccgaaactgccggagaagtgcggtatcattttttccagcacgcgctcatccatcggagacgttgcggcatgatctaaataaatccgttccattatgtttacacctctgatctaaatatagaacatataagcttcttgctctccgtctgtatagctggcaagatcctctaatgttgtactgtctaaaacctcttttacagcatcccggatgcgaatccagagctcacgcttggcaggctcctcatcttccagcacttcaacagggctgatcggcccctcaagcacacggataatatctcccgcagtaatggcatccggctcactgcctaatacatatccgccatatgcgcctctgatgcttttcactaaaccggcatttctgagcggcgataccagctgctccaaataatgctcggacaaattattcgtctgtgcgatgctttttaatgaagtcgggccttcaccgtgcttttttgcaagctcgatcataatggtgagcccgtatcttcccttagttgatattttcaacatgaacacctctgttatttcatgattttccacatttataatggtaatttctatatgtttcgtccgtttattatcttatagaccaactgttattataacataccttcagcgaattttcattgaggcagaaggaaaggggcctttacccttttctaatgtacggttttccgttaccctgtaattaagtaaggagagatgatagatgaagccattggcatatcggatgcgtccgacaaaaatagaggatattatcggccagcagcatctggtggctgaagataaaattattggcagaatggtccaggcaaaacatttgtcatccatgattttgtacgggccgcccggaattggaaaaacatcaatcgcaacagcaatcgccggttcaacaagtattgcttttcgaaagctgaatgctgtcattaacaataaaaaagatatggaaatcgtagctcaggaagccaagatgtccggccaagtgattttgattctggatgaagtccacaggctggataaaggaaaacaggattttctattaccctatttagaaaacggaatgatcattttgatcggagcaacgacggctaacccgtatcatgccattaatccggcgatcagaagccggacccagatttttgagcttgaaccgttaacacctgatctgattaaacaggcactggaacgtgcgctccatgatgagcatcggggccttggcacctattctgtatccattgatgatcaggcgatggagcattttgcccacggatgcggaggagatgtccgctccgctttaaatgcgcttgagcttgccgtgttgtcaacgaaggagtcagcagacggtgaaattcacattacattagaaaccgcggaagaatgcttgcagaaaaaaagcttttctcacgataaagatggtgacgcgcattatgatgtactgtccgcttttcaaaaatcgatccgcggctctgatgccaacgctgctcttcactatttggctagattaattgaagccggtgatctggagagcatcgcaagacgattgcttgttatcgcctatgaagatatcggtttagcaagcccgcaagccggtcctagagtgctgaacgctattcagaccgctgagcgagtcgggtttcctgaagcgcgaatcccactggccaacgcagttattgagctttgcctctcaccgaaatcaaactctgccattctggcaatcgatgaggccctggcagatatcagagccggaaaaattggggatgtcccgaagcatttaaaagacgcgcattataaaggagctcaggaattaggaagaggaatcgactataaatacccgcacaattacgacaacggttgggtcgaacaacaatacctccctgatcctctgaaaaataagcaatactataagccgaaacagacaggaaaattcgaatccgccttaaagcaggtgtacgataaattaatgaaaagaaaataaaacaaaaacagccttgatcatcaaggctgtttttatgcattatttatccttcacacgtttgatttcaatgtctttcaaaagatccatgacaacatgtccgcccataatcaaacctgcaactgacggcacaaaagcattagaggaaggcggcatttttgctttacggattttcgcttcgtcattccccacttcttttctgacatcttcccgaatgacaatcgggctttcatcagagaaaatcacttgaacgccttttttgataccctccttgcgtaatttcgtacggacgaccttcgcaattggatcagtgtgcgtttttgagatatcagcgatttggaagcgtgtcggatccgttttatttgcagcacccatgctggagatgagcggaatatcccgtttcagacattccttcattaaatgaattttataacaaatggtgtctgacgcatcaatgacatagtcaagatcatagtcaaaaaactgctcatacgtttcctccgtatagaacatttttaacgagattacttcacactccgggttaatgtctgcgatccgcgccttcattaaatcaactttcggctgtccgacagttgaaagcagcgcgtgaagctgacggtttacatttgtaatgtcgacatcatctttgtcgacaagcagaatgcggccgacgcctgaccgcgcgagagcttccgccgcgaacgacccgactcctccgactccaagcacagcaactgtgctgtttttcagcgtttcaaggccttcttttccgatagctaattcattgcgtgaaaactggtgtaacaagaacctcactccacattcgtattctggtttcatctataaaatggctgatccatgagcagccgtttttctgcgcacaaaaaataaagtcccaatagtgccgttgcagctttcctttgttttgaacccgctctcagcaggtgggtgccctcttttaaatcttgtaagtcctctttaccgaatgaaaagaggcatgtacgccatttaaaaatgcgggctcccaaatcaaaaaaatgttcggtcaaaactaggtgtacaactaacacatcaggactttatttaacttgtcaaaatcatatcacagacgattttgattttcaagaatccaactgcacattcagttcttaacttttttcttgatagaaagatgaagctcgtcaagctgagcgtcacttacttctccaggcgcctctgtcatcaggcagcttgcacttgccgttttcgggaatgcaatcgtatctctcaggttcgtacgtcctgcgagaagcataacgagacggtctaagccaagtgcgattccgccgtgcggaggagcgccgtattcaaatgcttccagcaggaatccgaactgttcagccgcttcttctggtgagaagccgagaagcgcaaacattttttcctgaatatccttttcaaaaatacggattgaaccgccgccaagctcatagccgtttaagacgaggtcataagcttgtgctttcatgtcttcaggcgctgtttcaatcagctcaaggtcttctcggacaggcattgtgaacggatggtgtgctgcgtaaaaacggccttcttccggatcatgctctaataacggccagtcgatgacccataagaaattaaacaatttttcgtcaatcagcccgcgctctttcccaagctttaagcgcagggcgccgagtgatgcggccacaacttcgaattgatccgctccgaacagcagcaaatcaccttcagcagcatcaagtgcttcaatcagcttagactgcttttcttcatcaaagaatttagcgatcgggcctttcactccgtctgcctcaaccttcacccaggcaagcccttttgccccgtagtttgcagcaaaagcgccaagagcgtcgatgtcttttctggagtaatcgccggcaccgccttttacgttgatggctttaaccacgccgccgtttgctacagctgatgagaacactttaaattccgtatcctttacaatgtcagacacatccgtcaaaagcatgtcaaaacgcgtatccggtttatcagaaccgtacttgttcattgcttcgtcatacgtcattcgaggaagaggaagcttaagttcctcaccttttgtttcacgcataacctttgccatcatctcctcagccaatgacataatgtcttcctggctcataaaggacatttcaatatcaatttgcgtaaactcaggctgacggtccgcacgcaagtcttcatcgcggaaacagcgggcaatttgataatatcgttcaatgcctgataccatcagaagctgtttaaatagctgcggggactgcggcagcgcatagaactcaccttcgtgcacacggctcggcaccaagtagtcacgtgcgccttcaggcgtgcttcctgttaaaatcggcgtttcaatatcaagaaacccattttcatctaaaaagctgcgaacagctttcgtcacgttatggcgcagctgcatcgtctggaacatagccggtctgcgcaaatctaagtaacggtgttttaaacgaacgtcctctgacacttcttcagcttgatcagaaatcgcaaatggaggtgtctttgcagcatttaatacgttcactccatcagcatgtatttcgatcgcgcctgttttcaaattcggattaactgttccctcttcacgcgccaccacttttccttgaatatcaagcacgtattcatttctgatgccttccgcgatagcaagcgcttcttttgacacatcagggttaaaaacgacttgaacaatgcccgtacggtcacgcaagtcaataaaaatcaatccgccgaggtctcgtcttttttggacccagcctttcagcgttacagattcgccaattgctttttcagttatatcaccgcaataatatgttcttccaaacaatgcgtttcactccttatcccttttggtttgccttcatcacatgtataaattcatcaagtgccacttcaatctgttcgcccgtctgtgcatcctttacattgattttgttttgggcaagctcatcttcacccaaaatcgcaataaatctggcctttaagcgatcagctgttttaaactggcctttcattttcttattttcataatcgatttcactggaaatgcctgcttctctcagtttgtacaccaatgaaacagaataatcctttgctttttcgccgagtgtgacgatatagcagtcgattcccttatcaacaggcagctctcttttttcagcatcaattgcggcaagcaagcgttcgatgctcatcgcaaatccgatgcccggtgcttcaggtccgccgatctgttcgacaagcccgtcgtagcgtccgccgccggcaagtgtcgtaatcgcgccaaagccctccgcattgctcataatttcaaatgcggtgtggttgtaataatccagccctctcacaaggttcggatcgatttcatacgaaatgccaagatcatttaagtattgtttcactttttcaaaataagcggctgattcttcatttaaatatgtcaaaatcgaaggtgccgatttcatcagctcatgatcacggtcttttttgcagtccaaaattctaagcgggttcgtgtgcagccgggactggcagtctgaacaaaattcttcgatgcgaggctcgaagtgtttcacgagcgcttctctgtagcttttgcggctatcttgatcgccgagactgtttatgacaagcttaacgttttctaaacctgctttttcataaatactcatcgcaagcgccattacttcagcgtcgattgcagggtctttcgaaccaatcgcttcaattccaaactgataaaactggcggtaacggcccgtctgaggacgttcataacggaacatcggcccgacataataaagctttgtcggctgtacaggatttgcgaacagcttgttttcattaaaagcgcgaaccgcagcagctgttccctccggacgaagcgtcaggcttctgcctttgcggtcctcgaaggtatacatttctttttgtacgatatccgttgattctccgacgcctctggcaaacagttctgtatgctcaaaaatcggtgtgcggatttctttatattgataagtgcggcaagtgtctctcataatttgttcaacaaactgccagcgatctgattctccaggcagaatatcctgtgttcctctcggaatgttatatcccataggtagacctccttatgtattccttataaaatatccaatgatcgttaatgatgaaaatgaaaaaaactcccgcccctactatacatgatagtagggacgagagttatacccgtggtgccaccctagttggaatacgttcatattcccgctcgatcctttaacgcaggttcacgttcactgcctaatggcgttattcacgcgttcagcaggaaacctccggagtgttgtttcgagaaagacgcaatgggatccgctttcagcctggggcgggttcctctctaatcatgcaatctgacctactcttctccattattggttcaaatctttcatcatttgctatgtactcaatttctattataataatgggattggggttctctgtcaagctttattccggttgtttttcctcagcgctgcttctttggacataagaccaaattcagatgctgtttccgtaagataaccagtcgtatcgggatctgcgtgatcgctgtaatgcagattcgcttcaccgtcgtgaaatgcacgtcccatttttggatgatatttcatgatttgcacacctttttgattgtatttacgcttagtataaacaaatcattttatttttatttaaaaatcagaaaggactttacgatattaaacaagaatgcttttttaatgatcatcagaaaggaggacacaatgaacaagaaatactttgtccttattgtatgtattattttcacctcagcgctattcccgaccttttcatccgttacagctgctcaaggagaagcggtcatcgcaacagatgaaatgaacgtcagaagcggcccagggcttagctacggcattacagcggaagtaaaaaagggagaacgctatccaattttaaaggaagatggagactgggtgcagatacagcttggttctggagaaaagggctgggtagtctcctggcttattacaaaggaagaccaggccagcacaagctcctcaggaagcagtgacactgtgacatcaacagaccccgatctgcggatgagaagcggcccgggcacttcctacgaagtcatcggcaaattcccgcaaggcagccaagcatctgtcattgataaagattcgggctggatcaagatatcctatcacagtgccaccggatgggtatcatctgaatatgtcacatcaggaggcagcagttcagcgtctgatgagagtgaccaaaccgaggattccggtgcgtcaacgacgggcacagtcggtgtttcttcgctaaatgtaagagcctccgcctcacatgacgcggcaattataacaaaacttgatcgcggaacgaaactgacggttctcaacgagaaaaatggctgggctcacattgaggtgaacgggctaaaaggctgggttgcaagccattaccttttgactagttctgttccagctgatgattcagcaaatgccggcagttcatcctccgctaaaaaagcctatatcatgtacggaggaacgaatctaagaagtgatgcgtcaacatcagcttcgatcgttgagcgcgctgccaaaggagattcatacaccattaccggttcaaagggaagctggtatgaaataaagcttgataacgggcagactgcttatgtagccaattgggtggtccaaacgtctaaaagcgcagaagaagcaggtgaaccgccagtctctgattccccgtctggaaacggctctctaaacaataaaacgattattgttgacccgggacatggaggaaaagacagcggaacgatcgggtattcggggaaattcgagaaaaacctgacgatcaaaacggcaaaactgctcgccagcaaacttagatcggctggagcggatgtatatgtgacacgccaggatgatacctttgtcagcctgcagtcacgggtctctacctctcactaccgtaacgctgacgcctttatcagcattcattatgacagctatgcggatacctctacaagaggcagtacagcatattactacagtcctgccaaagatcaggaactcgcatcagatgtccactcagaagtggtgaagcgttcttccattccagaccgcggcgtattattcggagattattatgtgctccgggaaaacagacagcccgctatgctgtacgagctgggatatgtaagccatccgcaggaagaagccattgtacatagcaattcataccaagaaaaagtaacagatgggatcgaaagcggattagagaaatacttccaataaaaaaagctgccttttggcagctttttttattttgaatccataatgagcgtgaccggtccggagtttgtaagctgaacatccatcattgctccaaacgttccggtctccactttgattcctttttcacgaagcaggtcattccatttttcataaagacctaaagctttatcaggtttggccgcgttcatgtagttcggccggcgcccttttttcgtatctccataaagcgtaaactgtgagacggataaaatctctcctcctatatctacaagagacagattcattttcccttcactgtcatcgaaaatacggagattgacaactttatcggctaaataagctgcatcatcttctgtatcatcgtgagtgatgccgaccagcaccataaggccttgtccaatttggccgacgacctcttcgtccactgtaacgcttgcttctgttactcgctgaacaactaatctcattttctaacccctttagttcatgacgcggcgcacagagtagatatctctaatctgtttaatacgctcgacgactttgtgcaagtgattgatattctgtatgaaaatcgccatatggatggttgccactttattgcgatccgatttgccagagacagatgaaatattggttttcgtttcattcactgcctggagcacctcgttcagcaatccgcggcggtcatacccaagaatctctatctcaacattgtattccttgcgcttttgaacttgtgactcatgctcccactctaccgggatcagccgctcttgggcttcattcgttttgacattcggacagtcttcgcgatggaccgaaacccctctgccttttgtgataaagccgacaatatcatcacctggcacaggattgcagcattttgataaacggacaaggaggttgtcaatgcccttgacacgaacgccagcttcccgttttcttccttgcgggtatggcttaggttccccagtgacttcctgaacgatcttttcctgttcttcctgatcgcgctgctttctctctttttctgttaggcggttcgccacctgcagagctgtgatgccgttgtaaccgaccgccgcgtacatatcctcttcatttgagaaattaaatttgtcagcaaccttttgaatattctccggcgttaaaacatccttcaattcaaaatccaagtttttaatttctttttcgaccagctcacggcctttttcgacattttcttcacgccgctgtttcttaaagaattgacggattttatgcttcgcttgggatgtttgggcaagcttcacccaatcctggctcgggccgtaggaatgcttagaggtgagaatttcaacgatatcacctgtccgaagcttatggtcaagcgtaaccatttttccgtttactttggcaccgattgttttattgccgatttcagagtgaatccggtaagaaaagtcaatcggaacagaaccggacggaagctcgattacatctccttttggcgtaaagacatacaccatgtcagagaacaaatcaattttgagcgattccataaattcttctgcatctgtcgattcattttgaaattctaaaatttcacggaaccaagaaagctttttctcaaaggttgcaccttcattggctgctttcccttctttataagcccagtgagccgcaaccccgtattccgctatttcatgcatttcaaaggtgcggatctgcacttcaagcggatcgcctttaggcccaataaccgttgtatgaagcgattgatacatattcggcttcggcattgcgatataatctttgaatctgccgggcatcggtttccagcatgtgtgaatgatgccaagcaccgcgtagcagtcctttatgctattcacaagaatacggacagccagcaaatcgtaaatttcattgaattgcttattttgcagcaccatttttcgataaatgctgtaaatatgtttcggacgtcccgagaagtcagccttgatatttacttcttcgacacgtttcttcacttcattgacaacctcatcgacataaagctcacgttctgcacgtttcttcttcatgaggttgacaattctgtaatattgctgagggttcaaataacggagcgccgtatcttccaattcccacttaatttttgaaatcccgagacgatgcgccaaaggagcaaaaatttccagcgtttcattggagattctccgctgtttttcctgaggcagatgtttcagtgtccgcatattgtgaagacgatccgccagcttgatcaatatgaccctgatatcttgagccatagcgacaaacattttgcgatgattttccgcctgctgttcctcttgagatttatatttaattttgccgagtttcgttacgccgtctacaagcattgccacttcttcggaaaatgcttctttcaggtcatcgagcgtcacatctgtatcttccacgacatcgtgcaaaaatccgcccgcgattgtggaagggtccatttcaagatcaacgagaatccccgcaacctgaatcggatgaataatatatggctcgcccgatttgcggtattgctcgcgatgagcatcttcagcgtacagatatgctttttcgacaaatgcgatatgctcatcagatagatagctgcgcgctttatctataacttgctcggcagtcaatacttgttcgttcgccatggaatcaccttttttaaaatgtaaactgtattgtagtttattatcaagaaaaaaacgaaagatgtaaagagcagaagttcaaatagccaaatattatataaaataaatgcaaaacaataggaaaaaagcaccctgacatggagtgctttttcgttatgcggttatccttagtatttcatcaatgttaagatgtcgtaatcttcgagcttatttctgccgtcaaggtaagaaagctcgattaagaaagcgataccagcaacaacgccgccaagttcttcaacaagtttgattgtcgcttcaattgtgccgcctgtcgcaagcaggtcatctgtaataagcacacgctgaccaggcttaatcgcatctttgtggatcgttaatacgtcttttccgtattccaagccataatccactttgattacttcacgaggcaacttgccttctttgcggaccggcgcaaaacctacgccaagcgcgtaagcaacgggacagccgataataaagccgcgcgcttcagggccaacgaccaaatcaatttgcttttctttcgcatattcaacaatttgatctgtggcatagcggtatacatcgcctttatccatcagtgtcgtaatatctttaaattgcacgccctctttcgggtaatccggtacaattgttacgtattgttttaaatccatctgttttatgtcctcctcgtactttcataagcctctgaatcttgtttcatcagcttattcagccattccttcagctcttcagcagaagaataattcagcttttgatccagttccatcagctgctgtttcgcctgatatgtttgtgagtctgttaagtcgcgtttctttgctccgctcacaacagacagcacaccattctctattttaacaaaaccgagatcaaaaaacacctttgtcatgaaattgattgtttcaacggaccagcctttatgttttgcaagctctgaaccgtgttttttcacgtcaaaagcgcctcttttcagcaagaacgcataataccatttaaagtggtctcttgcgggaaaagttgataaaaagtggtcctcatgattgagaaaaataaaatatatccgctcgggcgcctttccttccagcaaacgtgcgagcatgtccagcgaaggcggcggatccagtaatacaatatatgcaccatcgaggtcaaacgcctttgcttgatctttagaactgatgacgtgcacttctcggcgaaggtcttcagtttgaagtaatgttgttgagtcttctttgaaagagacaatggcccgtttagcagatggaagggcggaaactgtgtcttcccacgtccgttttccccttaaatcaaacagctgccattcagaaacagcggcatcctttatcataagctgcggcttttttcgattgttccattcgttgattgacatctcaccgacaatagaaattcttgaacccggtacgatgccttcttcaagctcgcctttattaaaaccgacgcaatcaagctgggacgactcgtttctgatcgtcattttgacatgagttttatttgcccctatcttgcggacatcttccagtactgcgttttctacgagaacgtgcggtttcgggttcagcatgccaaaaggagacagcatgttcatttctgcgatgctttcaactgtaatgtcttcgacgccgcagacaaggtcgacttcctgtacgggaataaaatcctcttccgtaagcgtattgtccgctatttcattcagcctgcttcgcaaatccggcacatcttcggctttcagcgtcatccccgcagccattggatggccgccgaaatgaggaagaatatctctgcattcagaaaggctctcaaataaattaaatcctctgatgcttcgggccgaacctttagcgattcccttttcttcatcaataccaagaacaatggccggtcggtagaaacggtccacaagctttgaagccacaatcccgacgactcccgggttccatccggctttggccacgacaattgcagtttgatcgagcccttgctgttcaaccatgtcaatcgcttcatccgtcattttgctgaccattttttggcgctctttgttcagctggtcaatttctgcggcaagctcttccgcttcaaacgaatcctctgacataagcaaatgaacagcgggatccgcctgttcgattcttccgacggcattcagccttggtgcgagctgaaatccgactgtttcttcgttcgcttctccgatgtctccgcctgacagcttaatcagctcttttaagccgagccgatttgtccgtcgaagcctttcaagtcctagtgttgctattaatctgttttcgtcatgcagcgggactagatcggcaatggtgccgatagccgccaggtcaagcagttcatcaggaagttcacccaataaagcgtgggcaagcttaaacgcgactccaaccccggcaagctctttaaacgggtaagtgcagccaggctgcttcgggtggacgatcgcacggacatccggaagctccggtcccggttcatgatgatcggtaatgatgacatccagtccgagttcctttgccaccttcgcttcatgcacagcggcaattcctgtatcaaccgtaatgatcaaagagaagccccgttctttaattgaacgaaacgcctgttcattaggtccatatccttctttaaaacggtcaggtatataaaaatcaacttgagccgacagtttttgcagcgtgtgaagcatcactgacgtacttgtaaccccatcggcgtcataatcgccatatatcataatcttttcttgttgtgaaatcgcctgttttattcgatctgccgcttctttcatgcctttcatttcaaaaggatcataaaaatcggcatcctttgtatgtaaaaacagcctagcgctttctgccgtatcaaagcctctttttacaagcagggacgcaacaagaggtgttatatgcaattgttctgtgagtgatttgaccttatcctgatctggtcgctggatttcccatcgcatttttgacgctaacataaattcacccctcaaccaccctattatactagagcaggctgaggggtttcaaataatattcgaaaactagtcttttttctcaatcatggctgatgcatcctgtgtgtcagtctgatcagcaagatgagtatcctcttgtttatgtattgctgttctattttctttccgcaaggtttttatttcccgcttcaatttcattacctgaaaaatgccgacagaaaatacgatcagtgctcccattaaaactgagcccaaaataacaagaatgagcggccattctgatcttccaaacaggtaatcaacttctacggatcgaacattaatgactgcgaaaatagcgacaattaaggtgaaaataagtgcgaaaataatggtccattgtttattcattctcttttcccccaaacttcttattgaggtaactttccccatcaagactggttttaaacatggcttaacactaggttaagctccctttgctgttaatttttcccggatcagcctcttcagtccggttccctcaccggaaatcacaagtgtatcgccttcgtcaatgactgtttcagagctcggattcagttgtttatcctgattctttttaacaattgcaatgaccgtcacatgatattcctgacccacattcaaatcaccaatcgtctgatgaatggcaggcgctcccgcctctgctttacaccactctataatcaaatcatcaagggctgactcgacctgttctaatgctttcggtttatatgccattccgccaagaattgcagacatttgccttgcttcagcgtcatcaaactgcacggaggcaacacattcctcatggtcgttttcgtcaaaatagtaaagctctctccgtccgtcatgatgaatgataattgaaattttatcacggtttctagtaatcatttcaactttttgtcctatgcccggcagctctgattcgcgaaccctcatatataaaccctcctacatatctgaaaaccagccataaacacttttaacaccatatatatgtttaaatgtaagcgtatgtcattatagcaaatgtctattttaagttcaatgaaacttcaaaaaacaggctgccctgcagaggacagcctgatattttttattgcgccgaatcttttttcagttctcttcctttccatgcaagccaaatttgtgcggcaatgtatagagaagaataaacgcctgttaacagcccgaccaataaagcaattgagaagttagtaatagaagatgctccaaagatcagcaatgtcacaacaacaatcacaacggttaatacagtgttaattgaacgtgtaaaggtttgctgcaggctcaggtttactatatggttcagatcggcaaatgttttcggcttacgctttttcatatgctcgcggaccctgtcaaatgtaacgattgtatcgttaatggaatacccgattatcgtcaagatggccgcgatgaacgtaacatctacttcaagccttgtaatactgaagaatgtgacgataaagaatgcgtcatatagcaatgaagcaatggcagcaatcgccattttgtattcgaatcggattgaaacgtaaataatgatgccaatagaagctatagcaactgcgtacagcgcatttcttgccagctccttaccgactgtcggtgaaactgtgctgacatttggctcagacccgtatttgtctttaaaatacgtttttacttttgctatggtttctttatctggcaccccgacaaaacgggcaacaccgatattgctcttttcgcctgacagaactacagtatcagggtccatacccagagattcaaaatccttctcaacttgctctgtcgtcagcttatggtcgctttgtacttcaatccgtgcaccgcttgcaaagtcaatgccaagattcagcctgaacacaagcaggataataatcccggcaaccgtgaccgcactggagaaaataaagaagtatttgcgtttgctcgtgaaatcccatttttggaatggcgtatgcggctctgtattttcatccgtatcctgaatatccatgatatgtttcttattgacaccaaaccagccttttttccgatcaagccatctgctttccacaaggagagcgaggagaaatctcgataagaaaacggcagtgataaagcttgtcaaaatcgataggatcagcattgtcgcaaaccctttaacagagcttgtcccaaagataaagagcacaaccgctgcaataatggttgtaatattcgcgtcaaaaatcgtcgcaaatgaccgtctgtttcctgaacggaaggcagagcggactgactttcctagcttgagctcttctttaatccgctcataggtaataatgttggcgtcaacagccatcccgacacctaaaatgagagcggcaattcccggaagcgtgagtacggcattcatccagtcaaagatctggagtgtaatgtagatataaacagacagcgtaatcaccgcgattaatcccggcagacggtaatagaaaagcataaataagaaaataattgcgataccgacaataccggcaaacaccgtatcatggagagcctgctggccgaattgtgcgcctactgatgtcgaatatttttcagtcagtttcacaggaagtgcgcctgcatttaaaatgctggctaaatcttttgcttcttgaaccgtaaattgcccttcaattgtaacatcagttgtgtttaattcctggcttacatttggggcggatacatatttagggtgctctttttgaacctcttttttaaaggagtcccctttttcgtaatccatccaaataacaagctggttgtttggcgccattttcatgacctttttggtcacttcgccgaatttatcagcatctttcagtttaatgctgacaatcggttcatttgttttggcgtcatacgtttgtttagctccgttttcgacgaggtcagagccattcagcaattctttgtcattcgtatctctgaaagaaagctgcgcttcagtcgccaaaatttcacgcgctctgttttggtttgtcacaccagcgagctgaacgcgaatccggttattcccttcaatttggatgttcggttcgctgacaccgagaacattggcccggcggttcaatgcctctactgtgctgaccagaacgtcttttgtgattttgtcacctttttttacaggctgtacatcatacagcacctcaaatccgccttgcaaatccaatcctaacgtaatattgttagcggcaggcttcgtaaagtagcccaagcccgtgccaatcaatagaacgaaaaggaaaaacgcaatcaagcgtccttttttcattatgtatatcctcccttaaacctgtgcgaatcaacctgctatctcagcagttcttccaatgcttcctggccctcttcactgcccagccaattagacgttttaaatgactcaacggttgcatagttcataaattcgccaattttcactgataaaatatcactcgccagttcataaatgttcagttccgttttctttttccacttcttatctgttaagtatgaccacaaactttcgagttcaacatcatcatacccgagaatcttaaactcttccagtttgctgtaaagaaacggcctgacgtggtctttatatagatcggctggatgcttctccacgaattccacgctccttttttattgtttttcaagaagacttgtcatgcttggacgatatatacgcatatctttattgtatatgattccaggtagtttgagaaggcagggggtaaaaatggcgaaacagacgtttttaaagggcactcttatccttatcgcagcaggaatggttacaagaatgctcgggtttgtcaaccgggtggttatcgcccgttttatcggtgaagaaggagtcgggctttacatgatggcggcgcctaccttcttcttggccactacattaactcaattcggtctgccggtcgcgatcagcaagctagtcgctgaagccagtgcgcgcggagatcatcaaaaaacgaaaaatattttagtcatgtctctgaccatcacgggagtgctcagcctcatctttacaccgctgtttctgtttttcgccccggttatggctgaaacgatgctgacagataagcgaacactgtatccgctcttggccattacgccggttgtgccgattattgctatatcgagtgtgctgaggggatactttcaaggaaaacagaatatgaacccgcttgctatgtcacaagtccttgaacaggttgtccgcatttcactcgtggctgtctgcacaacgatttttctcccttacggaattgaatatgctgcagcgggggcaatgctatcctcagtggcaggggagctggcatcacttctttatttattcgtttgctttaagtataaaaagacaattaaaatcagaaagcattttttccagtcaattaaaaacggaaaacaaacctttacccaattaatgagcgtgtcccttccaacaaccgggagccgctttatcggaaacctctcttggtttttcgagccaatcgtcgtcgctcaaagccttgccatcgccggtgtggcaacagttgccgcaacaaagcaatacggggaactgaccggctttgccatgacgttgctgactctgcctagctttattacatattctttgtcgaccgcgcttgttcctgcgatcagtgaaggaatggagcagaaaaaattgcaggtggtggaataccgcttggaacaggcgatgcgtctctgtctgctcagcggaggcatttcagttgttattttatttgtatttgcggatgagctgatgagagtgatgtacggttcttcaggcgcagctgtatttataaaagtgatggccccgttttttctgctttattattttcaaggcccgcttcaagctgttctgcaggcgcttaatttggcaggagctgcgatgatgaacagcttaatcggagcgctagtcaaaacaggccttatttttgtccttgccacaaggccttctcttggcattatgggcgcggcattagccattgtgacaggcatggtgctcgtcacgctattgcacgcagcaaccgtaagcaaagtgctgccgatcagcatcaaaatcaaggagtacgcgctcagcttcgctgttattgtaatttgcggattcatcagctccgccatcaaacattatataagctttggagcatctgaggctgtcaatctagccggatggattgcggtgagcgccgccatttatatgatcctcctgctcgttttccgtttaattaaaaaagatgagcttcgccgcattcccattatcggacgtctgatcatccgataatagtcacgtgcggtacccatctttttcgtcaataaataattctccgtctgtaaacgagcaaaatgaaatatctgaagggtttgtgtatccgtgtttttgcaaactttcaagcagccattttctatctttactgattctggacaggttttctgtttgaatgaagccgtctataatgagcggcatttcgagctgccgatgctctccgctattttctttctttacaatagtcagtttgcccgacggctctaaaatggcaaatgatacgtcagctactctgtcgacgctattttctctgagttgaaccattaaatcatcaaaattatatcgctgtgatttcatggcttcttcgtcaatttttccatatttgataattatagtcggcttaccgtcaagaagctggcggacttttcggttttttaaagaaaagtatgccaaagtcacttgaatgatcattaatacaagcattggcaaaatggtatgaaatagatgatcgtctacgttttctatggctaaaacggcaatttcagccatcatgataaagacaacgagatctaaaatactaagctctccgatctcccgtttgcccatgaaacgaaaaatgaccaatatcacaaaatacaatacgactgtgcgaaacgcaatagtgagaagctcttccatcatgcacctccaactcattataggttgcaacaaaatgatcaatttatgtaagaaaaaccgattgcatttcacaaagcttttacgtctaattcaagggataagggaatacatttttacaaagacgagccatcagcatgtctgacggctttgtgcaaaaagaacagaagccttttaatacaggcagagaggagacaatcatggaggaaacgaaacaagttggaaaaggcattctttacggcttaatcgccatattttcagccatgctcctgacaagtttggcggtttcacttttattgaccgcaacctcgctggaagaatcatcatttaactggctgatcacagctatctcatttctctctttatttatcggcgggttcatttcaggcgggaaaggcaaggaaagaggctggatgattggcgcattgaccgccttaagtttttctctgattatcttattgtttcagtatttaggattcggaaagacatttacagcagaacagctgatcttccatctgggatttttaggggtgtgcatgctgggcgggattttcggcgtgaacatgaggggaaacaggtcttccacataaaaaagagcgggctcacttgcccgctcttttttgtttgctatgtatagctcctgctgttattcagcagcagaaacttctctgatcgcgcggcggtcgaacgtaagacgtgtgttatcaccagtcttaattacgactttgctttcgtcgatagagtcaacagtaccgtgcaatcccccgattgtcactactgaatcgccttttttcagttcctcttgcatttggcgtacagccttttgctgcttttgctgaggacgaatcagcaagaagtaaaggaccgcaaacattaaaataataggaaccaatgtacctaaagtgccagtcatcattttcacccctttctgtaagcctgttatgtttatttagaagcttttcgcatttggcttgttatagccgtaacgctcaaagaactcttctctgaaatcacccagacgatcctcgcgaatagcctgtcttacctgctccattaagtgtaacagaaaatgaaggttatggtaagttgttaatcgaaggccgaatgtttcattacagcgaatcaagtgcctaatgtacgcgcgagtgtagtttttacatgtatagcaatcacactcttcatcaatcggacggaagtctctttcaaatttcgcatttttcatattgagtcgtccttcagcagtaaacactgtgccgtttcttgcaatccgtgtaggcagcacacagtcaaacatatcgaccccgcggatcgctccgtcgatcagtgcatccggagaacctactcccatcagatatctcggtttatccttcggcaagagcggtgttgtaaattcgagtacacggttcatgacatccttcggttcacctacagacaatccgcctatagcatatcccggaaaatcaagcgaaatcaagtccttcgcactttgtgtccgcagatcttcatattctccgccttgtacaataccaaacagcccttgttcatcctgacgattgtgggcattcaggcagcgttccgcccagcggcttgtccgctcaactgacctcttcatgtagtcgtactccgccgggtatggcgggcattcatcaaacgccatcataatatcagagccgagtgcgttttggatctccatcgctttttccggagataaaaacagcttgtctccatttagatgattgcggaaatggacaccctcttcctctatattacgaaacttgcttaaagaaaagacctgaaaaccgcctgaatcggttaaaattgcgcggtcccagttcataaatttatggagcccgcccgcttctttgacaatgtcttggcccggacgaagccatagatgataagtattgctcaaaatgatgcctgcatccattgctttcagctcttcaggcgacattgttttgactgtcgccagtgtgccgaccggcataaaaaccggcgtttcaaaggagccgtgaggcgtatgcactttgcccagccgcgctcctgtttgtttgcattcttttataaattcatagcgtattggttgttcagccacttttgatgaggcctcctgttctcaaattatataatcagcatcgcgtctccgaagctgaagaaacggtattcctcttccactgcatggttataggcacgcagaatgttttctcttccagcaagcgcgctgaccagcataatcaatgacgatttcggcaaatggaagtttgtaatcattccgtcaatggctttaaattcatagcccggataaataaaaatagatgtccagccgcttgatgctttaaattgcccgtcatgttccccggcaatcgtctcaagcgtgcgtgtcgaggtcgtgccgacagaaatgatccgaccgccattttctcttactttgtttaaggctgcagccgtttcttctgacatttgataaaactctgcatgcatattatgctcttccacttcatcggcactcacagggcgaaacgttccaaggcctacgtgcagtgtgatgaactcaatttgcacgcctttgtctttcagctgctgtaagatttcttccgtgaagtgaaggccagctgtaggcgcagcagcagagccgatttcttttgaatacactgtctggtagcgctctttgtcatcaagctgttctttgatatatggagggagcggcatctctccaagggattcaagcacctcgtagaaaataccgtcatattgaaattccatctttctgccgccgtgctcaagctcttccgtgcagattgccttcaatcttccgtctccaaatgtgacaacagttccttttttcacccgtttcgccggtttggcaagtgtttcccatttatcaccggtttcctgtttcaacaaaagaagttccactttcgcgccggtatcctcttttgtgccgaataaccgcgcaggcagtacccgggtattgttcaggactagacaatcgccttcgttaaagaagctgataatgtgtttaaacgagctgtcagtaagctctcctgtatgtttatcgagcaccatcagccttgaagcatcacgctgctccaacggtacttgtgcaattaaacgttctggtagttcaaaatcaaataaatcgactttcatgatgatttcacctttattctagtcttttgttatttcattctgccaaaaagattaagcaaaattgataataccacacttataataatacaagtgacaaccgggaagaaaaacgtgacatttcctttttttacaaaaatatctcccggcatcttgccgacaaaatgcaaaactgctccgataataagcaaaacagcaccaagaatcataatgatcttaggaaattcagtcatatcggggagcctccatttggaaatgatgataaacggccggtgtcacgatccttccacgcggcgttctttgtataaatccaatttgcagcagatatggttcatatacgtcttcaatcgtatgcgattcctcgccgatggtagctgaaatcgtatcaaggcctactgggccgccgttgaatttttcgatcatgcccatcagcagcttatgatcaatatgatccaaaccgaggcggtcaacctgaagccgctccagcgcattctgagaaatgtcttccgtaatcctgctgtcacccagcacttgggcgaaatcgcgcacccttctcagcaggcggttcgccacgcggggcgtccctctcgatcttcttgcaatttcaagagccgacggtttatcaatctcaacctcgaatacatcagcggttcttgtgacaatatccgccagttcttcttgtgtatagtactcaaggcgagacatgacgccgaatctgtctcttaaaggagccgtcaaaagccccaccctcgtcgtggctcccaccagcgtaaaaggcggaaggtcgaggcgaaccgagcgggcagatgggcctttgccaatcacaatgtccaggcaaaagtcttccattgcaggataaagcacctcttcgatcgatctgtgcagcctatgtatttcatcaataaataatacatctcccggttccagcgccgttaatatagcagccaaatcaccaggcctttcaatcgcaggccctgatgtcgtccgcaattccactcccatttcattagcaacaatcgaagcaagcgttgtttttccgagtccgggcggcccgtacagaagaacatgatccagcgtctcctgtctcattttcgccgcatctataaacacgcgcaaattttcttttaccttatgctgcccgatatactgtgccagattttgcggcctcaggctttgctctatcactgattcatggttgtctgcttcacttgagacgagccgttcatccatgaacatcaccttactttaatagtttttgtaatgcttttttcacatattggtctgttgtcagcccaatttcttctttaaggtgaggaagcacctttttgatttctttttcagcatatccgagaaccctgagggcttcaagtgcttcttcaagagccgtttccgctgtttgcttttcaagcctttcttcatgattaaacagattttcaatcatttcaggcacaacatctgccagctttccttttaaatctagaataatctggcgtgcggttttttttcctactccaggaaacttgaccaaaaaagcttcatcttcattttcaattgcttgaatgaccgctccgggatcacccgagcccaagatggcaagtgctcctttcgggccaattccggtcacgtttaacagctttgtaaagagcgccttctcctctcttgttgaaaaaccgtaaagcgaaaaagcatcctctctgatatgatggtatgtaaaaatcgtttcctggcttctctccttatatataaagggattcggcgtgaaaatctgatagccgatgccgccgttctctatgacaatatattggggagatacataatcaatcgtccctttaacaaattcaatcacgcaaattcacctctttgactgttcttcattgtaccataaaaacagccaaagtcttatagaaaagttaacatacgttcgcttctctctcattctttcacgaaaaaaaagacatgaattcatgtcttcaatcagcggacgttacccgctgtatgtcttcatatgttcgatgacatcctcaaactccgcttttgtccgaaatggaatgcctttcagcagatttttttgcatatggctttccagcctttctaaatcaatttgaaaaaaagactgaattggttcggaagctggctcaggccgcccatgaaaagtggaaatcactccattatccgatacaccgatatacccgttgaccttgctgagcggagaaatatcgtccatttgcttccggaagagcacatatccctttttttgttccacaagcgtccatccggcataagctgcccaaaaatcatccatagaaaacactttttcatgcttatgctcaatgctgacatcgccgtccaaatacaccttttcaagctgcacatgcacctgcagcggctcatagtgctccacttccgcgccaagtgcgcgggaaggagctcctattaaaaatactgccgctgagcaaagaatgcccagcaaaagatacgccgtgctgaatcgtttcaccctctacacctctttgcacacgtttatgattagtttgaccaaagaggctactgcttaaccgttttatcaaaatttgtctgcacattttccctgacaaaccgttcctccgtatacacatctgtgctttgctcagaaattgtcaagaatcgcgtcagaaaggcactgaaaaaatacaatgccgcaaagatccaaatcacgccgcctgcaccgagcggcccaatgaaaagactcacgatgcccggcgcgataaacgcacataaaccagatcccaaattcaacactgacatggcagcacctttattatcaggtgcaagcgtcggcaaaagcgcgcttaatgggacgtaccctgctaaagccgcgccgtagcagcaggcgataatcatgagcacccaatactgatgcccgatcagctgaggcgtgtaatacagcgccagcgtaaaaataccgcatccgacaccgccaaaccacatgaccgtattgcgccagccaagtttatctccgactgcaccgaaaatgatattaaacacaatattcacaaaaaacagcgtcccccatatttgcagccattccgaaaccgaatacccgtatcgtgctaaataagtaggaagaaagatggcaaatccaaattgtcctatcgcattaatcgtcttgaccactccgccgatgcctaccttagggttttcaaacataattgtaaatgccttcgacaattctttccatttcggctgatcttgtttttgtatcggagtaaatttatctttgttaaaaaataaggcaagaattccgcctgccgccacaaacagtaaagcgctccaaagcgtattgatttctccaaaggccggaactgcatagctggaatagaacgggcccagcacgttaaggccgcacgtaaacataaaccaaaaccagccgacggctttgccgagaatattttgagaggtgctgtatgacacccatacgagaaaagagtatgcaaacagcggatatcccaagcctctaagagcatagctgcccaagagagccggataatacatatgaggaatcgcccagccgataaaagcggccgaaccgaggataaatgcaagcaatccgacagtcatcgtttttctcggcccccaagtttggacaaacgttcctgaaagccaagctgagatggtgacagcaatgccgtacatggtaaataacgatgcggattgctgcatactgagaccatgatcaacgagaaaaggagacagccagccttgttcgaggccgtctccaaccataaagatgacaacgccaatataaccccaaaccatgtgagaaggaattccgattttgttcaaaacatttcctttagcatgtactgtattcattttctccaccgcctacttaaagtatcaatggagtatatacccaagcttgctgaattgtaatcctgttagattaaaaagcgattttttcagtgtgctcaatgctgacaggcatgccaaaagcaagcgattgctgtgctgctctggcgatccttccggcctgtaaaccgtcattgccggtgcagggagtctcctggtttgtgccgatcgcttctgcaaaacggagaatctcctcctcatatgaatccttatagcgttcaaggaaaaagaaatgcggtttatccttcatcacaaaatcagctgttgacacctcaaccgttgtcggcctgctattatcagccgctgcagagcctttcgtcccgaaaacctcaacccgctggtcatatccgtacacagcttggcggctgttatcaatcacagccatggcaccgttttcaaaagtcagtgtaataacagctgtatcaatatcacccagctccgcaaaagaaggattcaccaaagctgcccctttggcatacacttccgtcacttcgcttcccataatatatctggccatatcaaaatcatggatcgacatatccataaacaatccgcctgacgtacggacataatctatattcggggttctgggtcccgggacgtgatttttaataaatgaggtgtaccgatttcaccattttcaacaatcgttttgattttcttaaaatgaggatcaaagcggcggttaaatccgacttgaagtgttacaccgtgtttccggacagccgcaagcgcttcactcgtttcgtccagagagaaactaacgggcttctcacaaaatatatgctttttcgcctcggctgcttctttgatcatctgtgcatgtacggctgtaggagagcaaataaaaatagcatcaatatcaggatcatgtaataaatcacgataatcagaggttatgtattcaatctgatgactgtcggcccagctttttatacggcttgcctgaatgtcagagactgcttttattttcatgtgaggaatccggcttatattttgaacatgaagtttgccgatgcggcctgcaccgataatccctgtcacaatctgttttgtcatggcttcttcccccttgatcattcacgaaagcgctttatttaaaattaatactatcccatttgtaagcgcttttcaagaatggaaattaaacgttctatgtctcttttatcacaattcatgcttataagtagccttcttcttcaagaccagatacactagaattaggctctttttcctgaacagtttatgattttcctataaacagctgcataaaatagagcaaagaaggtgaatgaaatgctgacaaaagcagaggcactggcccataccgtcatataccgcaagaacagcagatttgataaagtcaaagagaaatccgaggaattaacactaatcggcaagggaagaagcgcctatgtgtttgccttaacagaaggcggtcgaaaaatggcgctgaaagtattttttccggaatatcaagcgacagcagtcaaagaagcagcgatctatgaaaaattagccgggtccgcattctatcctgacatttacgaaactggcgattcatttattctcatggaatatattaaaggtgaaaccttttataactgtctgaagaaaggcattgcaatcagtgatgacatgattcagcaggttgaagaagcgctttctgacgcccgggcagccggactgaacccgtcagatattcatttgcggaatctgatattgacagaaaccggggcggtgcgggtgattgatgttgcgagatttgagcagacaaaaacatgcacgcagtgggacgacttaaaatccgcatatcatgcactctacaaaaaaccgatattccccaaaaagattccgggtttttggctggagatcatcgcatttttatataagaaagattggtttcaaaagcatttcgcacagcggaaaagaaaatattcttaaatcaaaaaggcagccgcacaagcggctgcctttatcatgtattttttactttctgacggcagaaatcagtttcatttgttcaggcgacagcttaattcgatagcctctcacagttaagtagaccgcttctgggtccttctcaccggaatgacaatacgttttttccatttctgtctcccctcaccctttattggctttatttcatcttatcattgctttattaaggtagttttaaagaaatgtaaagatcatatgaatccgatatatagtaaaatgagagaaaaaaagggagagagtcacattaagacacgcagcaacatcccgcttattatgtttgccctgctggtcttcttcggcggcgccatctattggatgttattttcactaaaaaacgttccgaaaggcaatctcgtccaatcggttgattcgccggacggcagctatacgttaaacacttatgtatccgaaaacatcttgagcttagatgcagccagaggtgaacttgtaaatgaaaaaacacttgtcaagagaacaatctactggaattacccggacagccgcccagcagtgacgtggatcaatcacaatacagtgaaaatcggcaatcagactttacatcttgatactgatgaaacgtatgattggcgaaaagatgatcattggatccgtgaaaaaccgccgcaggcgtcagtgaggtgatgaaacatgaataagatgaacggaacaaatgatgacaagcatttcaatcattttgtgattgctttatcctttatatacggtttgactgaactaggctatttgttgctgaaggattttataacaattgccataagtttgcctctgtagaaaaacgcagcgtagtcgatacgccgcgttttttctttttcccttcctcttcttattgttaattacaggtcatataatgtgacaaatcgattgtagaaatagttcgattagaccaaaatcctttttatacatgtattcgaatttgaagtgagggggaagcttgatggcagattttgttgctagtttgaatgcggtcttatggagtacgcccgtcatttatattttattgggaattggattcaccttttcaattatgacccgttttttacaagtccgacatttaaaagaaatgattgttcagatgttcaaaggcaagagctctgaagccggcgtttcatctttccaagcgttatcgattgcgctgtccggccgtgtgggcacaggaaacatcgcgggagtggcgacagcaattgcattcggcggacccggtgcagtgttctggatgtgggcgattgcctttatcggggcggcgagtgcctttgtagaatcaacgcttgctcaaatttacaaagtgaaacaagacggtcaatatcggggcggccctgcttattatatagaaaaaggcttaggcattaagtggtttgccgtcttatttgccgctgctgcccttattgcaatggcctttctaatgccgggcgtacagtccaactccattgcggctgggatccaaaatgcattcggcatctctcctttcgtcacagggtgtggtctggttttattattagggttcattatttttggcggcgtcaaacgaattgccaatgcggcgcaaatgattgttccatttatggccattggatatatcctgctgtctttgattattattgtcatgaatgtgtctgaattgcctgctgtgatctcattaatattcaaaagcgcctttgcattggattccgcttttggcggcttgatcggcatggcgatttcctggggcgttaaacgtggcatttattcaaacgaagccggccagggaacaggcccgcatccggcagctgctgcagaggtttctcatccggtcaagcagggactggttcaggcattttctgtttatattgacaccttgtttgtatgttccgctacagctttcatgatcttgtttaccggcatgtacaatacccaggctgcagatggttcctttatcgttcaccagcttaaaggcgtagaagcaggacctggtttcacacaagcggcaattgacagtgttcttcccggattcggtgcaggctttgttgccatcgctttattcttcttcgcttttacaacaattatggcgtactactacatcgcagaaacaaatatcgcctatttagcacgaggcagagaaagcaaatgggcgatgcttggcttaaaactgattattttagccgccacgttctatggtactgtgaaaacagcttcacttgcttgggcattaggggatgcagggcttggcattatggtatggctgaacgtcattgccattgtgctgcttgccaagccggcgctccttgctttaaaggattatgagcgccaaaagaagcagggcttagacccgatctttgatccaaaagcgctgggtatcaaaaacgctgatttctgggagaaagaatacactcatgaaagtgaacgtgtctcctgaacatactaaaaccggcccgatatgacctcgtgccggttttttatgaacgatagtttgtatacacttcttgaacatcatcgtcatcttcaaggacgtctattaatgtttccagcttctcaacagcctgatcatcggcttctgcataggtattgggaagcatggtcacctccgccgaagaaattggatatttcgattcgagggctgttttcacctcttcaaaatgctcaggctctgtgaaaacctcatataggttttcttcaattcgcagctcttctcctcctgcttcaagcacatcaagcatgagctcatcttcttctatttgccattcagtacggtctatcgtaatgaacccctttcgttcaaataaaaaggctacacatccgctttctcccagacttccgccatttttattaaaggctgtccgcacatttgacgccgttcggtttttattatctgttacgcattcaaccatgacggcaatccctgaagggccgtagccttcataggtgatttcttcatagctgcttccgtcttggcctcccgcagcttttttaatggcccgatctatattttcattcggcatattggcgccttttgctttttcgatgacaagacgcaatgctgaatttgcttctggatccgctccgccttctttcgctgccacatagatttcttttgccagcttcataaatattttcccgcgctttgcatcctgtgcattttttcttttttgaatgtttttccacttggaatggcctgccatgttttcaccttcttttacattttctatgtacactttaatgggaattgttcgctgatgcaaagaaaaaggctgccgaatatccttccggcagcccttccttcctagcggttgttcattttatgaagttttctgaacagccctttatctgttgatacttggacgtcacggccatttgcatagttgcgcgctgcttttacgacattatctctgtcagactttgtgaactctctgtggcttttgactgcgataactactcggtcatcggataccataacttgtgtgtcattgacgtttttcacttgtttcacacggttggcaatttttgcagccagtcttctgttttcttggttgtcatacccgttgttcgctgcattccgattcatgtttcggttattcgtgttgttatatgttccgtcagttgccaaaggaacacgatcgtcagcagtaacacggtcacggttatttacattcgtggtgtttcggttaccgtcgttctgatcctccattaattcagaaacaggaccatcgtggtcgattccgtctccctgtctatcggcgtcattttcatttgtataatatccgattggacgggtattgccgttattgcgcgtatcattcatagcattatcgtttgctccgcatgctgttaagccggctgtcattagaatcaggctagcgatcgtcatttttttacccaatggaaaaaccccccgtggacgaattgagcatgtttgctcgcttttatcatgtgcgtatggggggcatgttaagcgtgtcagttctctccatttggcagtgatcagcttgaaaataaaaaaaggaacgatttacatcgttccgaacaatcactcattttcttcttccggccggccaaacatttggtttacagaaggctggttcgtcattggcatagaaactcctgccgaatatgggtttggatttgggttagctgtgccatatggcatattagggcttccataagctcccattcccgaatggccaggcgcagagaaatatggctgatgatcaccgtcacagccgcagtcgtcatgatctttgtatggcatgtaaccatgagccgcagcaggctggtatgctcccattacttggggagtgccgtaataagggccatacggcatatgtccatacggagatccataagccggagatgcgtattgcggcgcaccgtatgaaccgtaatgtccgtgatggctgttttcatgatgctggttttcataacccgggtcatactgaggcgatacaaatcctggctggtatccatgcatcggatgcattggataagcttgtgccggatagtacggatagcataatcctgatcctggaagaattggcgaaacaggcaccggacacggtacgaaatgagccggataatgataataaggctgaacagccggcatcggcatattcggaactgtgtgatgaacgttttcctcttctacaccgcctacctctggcgcctttggcatattaggcatattcggataattagcattttccatattactcatagcctcctgttgtggaaattggtcttgcatatgatacatatgatccatatttccgtcatgatgtttttttggctcctccggtttaggaggcgaccaaggctggaaaagctgtttcatatcataataatcgttcacatcagcttcagggtacacattttcctgcaaattaggcatcggcgggacatacggcatggacttcttttctttcggctttgtgtcttctacatcgacaacggatttaggcttctctttcgcatatggatgttcttgcttcacactcccggccgcaggacttttgcccgcttttggctcttttctgaccgggactccttctgacggcacttttattttcattccaggcatgattaagtctggattgctaagctgtgtattgagttttttcacttcctcaacatcgactccgtacttttcagctattttccagagcgaatcgcctttttgaacgatatggattttcaacgttttcccctcctatgcaaaacgtgaacagttcagctgtgattacaatatgtttcttcacaacatatgcctgaacaaaagaagttatgagtaaaggaagggaaaatatttctgatctacgtgatcgaaagcattcgattcagggcaaggagtgcatcttcctgaatggcttttggcaccttgatgacgcctgaaggttctcctttttcaatttgttccagcgaccacaacaaatgcggcaaatcaattcggttcattgtcaggcaagggcacatgtcagggttgagtgattcgatttgtttatctggatgctcgtgaatgatccgcagaacaagattcatttctgtcccgattgcccacttgcttcccgccggagcctggttgattgtgtcgataatatatttcgttgatccgttatcatcgcttagtgtcacgacttcgtgtgaacattccgggtgcacaatgatctgaatgtcggggtctcgctctctcatatcatggatatttttagtggtgaatttctcgtgaacagagcaatgccctttccacaaaatcactttcacattcgtatgcccggattcagctactaattcatctttcatcggatcccacacagccatatcttcaagcgcaatgcccagatcataagccgtatttctccctaaatgctgatcaggcaaaaataaaattctttttttctgtgtaaacgcccattcaagcacttttttcgcattcgaagaagttacagttgctccgccatgctttccgacgaatgccttgatctccgcagtggagttcacataagttaaaggtatgatcgtatctccaaatatatgctgaagcttcttccatgccctattggtctgctgcatgtcagccatgtcagccatagaacatccagctctcatatctggcaggacgaccgtttgctgctcgcttgtcagcatatcggcggtttctgccataaagtgaacgccgcaaaatacgatataatccgcttctttgtttttttccgctacttgggccaattgcagggagtcgcctgtttggtcagcaaattgtatcacttcatccttttgataatgatggcctggtataaagagcctgctgccgaactttttcttaatggcggcaacgcgcgtttccatatcctttctcgatagttctttataactttcgggcatcatatcattcgattgtttgatcacatcaagaattgacataacggcattcctccacagattcatttgataacgtaacatccatgctgatatctaaacttttgacggaatgagtcagaaatcctaatgaaatataattcacacccgtccctttaaaagcaggcaaagattctaacgtaatcccgccagaggcttcagtttttatatgagccggtgtgagctttgcaaaatgacggaccgtatcaggcggacagttgtcaaacataataacatccgctccagctgcaattgcttcccgcagctgtccctccgtttcaatttccacctcgatatttaccatgtgccctgcggcctgacgggcttttttgcacgcctctaaaatagagccgcatgctgcgatatgattatctttaatcatgatgccgtcatacaaaccgaatcgatgattatacccgccgccggctctgacagcatatttctccagcattctgagccccggtgttgtttttctcgtgtcacaaattttaatctgttcatcatccagacaccgaacagcctctcttgtcattgtcgcaattcctgacagtctctgaataagatttaatacgacccgctctcctgaaaggagcgcagctgcgggaccgtgtaactcggcaatcacttcacctttatgcaacatgtccccatcttttttgtttaaaatgatttgaacattttcgtccaataacgaaaagccttcttttatgatcgctgctcctgcaaaaataccctctgactttgcaacaatctccgcttcacagctctgttctccaaaaatagactgcgatgtaagatcccctgtcccaatatcctcaagaaaaaagtgattcagtaattttttcagctgtaaatgattcattgttccaaatcccctcgttttttctgatcttcgttcctttttttgtatggacaatttgtcttccttgccagcccacctcagtatgaggaaaatcggttcggaagtgagcccctctgctttcctcccgcaaaagcgcagaaaacgtcatcagctttgcagtttgccatagatgagaaagttccatctgccgaattgtgatatccttcacatttacttcctgaaaaggcagcgtatgaagccagatgctaagctcaatcaaactgctttgttcccgcagaatagacatgtggcttgtcattttgctttgcagttcatgcacctctatatccggcacctcgtagaagacactggtttctagccctgattgatattgcctgttataagccggtttttggataatatgctctgctgccctttttccaaataccagcgcttccaataaagaattgcttgcaagccggtttgctccatgtaaaccggagcatgctgtctcgccaatcgcataaagccccggcactgtcgtttctccccagcgattaactgaaacacctcccattaagaaatgcattcccggagcaacaggaatttttccgctgtggatatcaatccctgctttttcacaaatagcggtgatagtagggaaacgcgtttcaaaatcagaaatcgcactgaagtctatataaacgcgatttccttttgccatttcttcgtgaataacccgtgagacaatatctcttggagccaggtcacctaaaggatgccgttcagccataatcctgcggccgttttcgtctactaaacatccgccttcccctctgacagcttctgaaacaagcccgtagaaaacaccatttttcacaagcagtgtcgggtgaaactgagtaaactccaaatccgttaattccgccccggcccggtaagccagagaaagaccgtcacctgtgacagtgagatcattcgtatggtgaagaaacaggtttccacagccgccggcagccagcacaacttcgtctgcgtgccttaccttgagccgccctttgctgtcttttgtcatgacgccgatacatcgtccgtcctctataagcaaatctgctgccatttcattctcgattaacttgattttgctgttgatccgtttgagcaaataatcgataagcagcctgcctgttgcgtctccgcctgcatgaaatatgcggttgtatgagtgggccccttctcttccaagacaaacaccgcctcgttcattgcggtcgaatggaaatccacgctccaataggctttgaaccatcatttttccatcatgtaatacgtctgctgcaatagctagattattatggccgcatcctgcgtataacgtatcctccagatgggcttcaatcgagtcatcttttgcataggccgcagcaatcccgccttgtgcatagacagaattgctgtttttgacgcttttttttgtgataacagtcacttcgtatgagggcgggaaagctgcagctaaggaaagtgccgccgcccctgaaccgatgactgcaatcgtctttttagacatatgccatcctcctgttgtttacacctgtcttgacacctatatttacacaaggataaaataaactcaagagttttttatggagaacggatggaggaagaccggatgatttatttagattatgcagcgacaacgcctatttgtgaggaagcccttactgtatatcagaagcttagtatggatatgtacggaaatgccagcagcctgcatgatgcaggaggaaaagcaaagcacatactggagtactgccgtgaaaaaatcgccaacatcattggcggagaagcaagcggcatctattttacaagcggcggcactgaatccaattttctggccattcaatcattgctaaacggcctgccaaaaacgaaaagacattttattacgactgccatggagcatcagtccattcataattgcgctgcttttttggaacagcagggatatgatgtaacagtcattgaaccgaatgaatacgggcttattaccgaggaaatattactagcccatatccggccggaaacaggccttgtatctattcagcatgcaaattctgaaaccgggatcattcagcccattcaccgcctgtcttcatacctgcacaataagggcattcttcttcattgcgacgctgttcaaacgtttggaaagatcccgatcaatacaaaaaatctgggagtagatgcactctcaatgtccagccataaaatccacggtccaaaaggagtaggggcggtctatatccgtccggatgtcccttggaaacccgtttatcctctgactactcacgaatacggattcagagccggcaccgtaaatgttcccgggatcggtgccttcactgccgctgcagaattgatcgtaagcgaaatggaaaaacagatatcccgcaatgaggcattaagaacttactttctagaccaaatccgtattcggtctctccctgtaacccttgcggcagacacttcgcaagcagaatgtcttccgcatattatagggtgtttttttcactcatttgaaggacaatatgttatgttagaatgtaatcggagtaatatttgcatttcaaccggcagcgcttgttctgcaggttaccacggtccgtctgaaacaatgaaagcattaagaaaaaccgaacaagaagctctgcaatttatccgcatctcttttggcaggcatacaacagctgaacagctggaacagttattacatacgtttacagtgctttgggaacaaaagaaaggagaatttgatattgaccgaagaattaaagctaatgggcgccaacaggcgtgaccagcttcttctgtggctgaaggaatctaaatcaccgctgacaggaggagaactcgcaaaaaaagcgaacgtttcaagacaggttattgtacaggatatatcgctcttgaaagcgaaaaatgtaccgattatcgccacaagccaaggatatgtatacatggatgcagccgctcagcagcaccagcaggcagaaagaatcatagcatgtctgcacggtcctgaacggacagaagaggaactgcagctcatcgtcgacgaaggcgttacagtaaaagacgtaaaaatcgagcatcccgtgtatggagatttaactgcagccatccaagtaggcacccggaaggaagttagccatttcattaaaaaaatcaattctacgaatgctgcctacttatcacagctgaccgacggcgtgcacctgcatacactgacagcacctgatgaacatcgcatcgatcaagcttgccaagccctcgaagaagccggcattttaattaaagactaaaaaaagccctctagagggcttttttataattggtaagactggtatgcacccaggagctttactttgcagccgagcgcttcaagctcctgcatggcccctggaatcaatacatcatcaaacgctttctcaatatcaataataaagaaataatggcctaatccggttttagtcggacgtgactcaatttttgacaagtttaaatttctccaagaaaatgcagacagcactctatgcagcgccccggactgatcatcctgcggcagcatgaccattaaggtcgttttgggcctagaactcaattttgaattcacttcaaaagatatgttttcatcaggagacaggataacaaatcttgtatgattgtccctataatcctgtatatcccgtttcacgatttttaattcgtatgtagaagctgccatatcattggcaatgaccccgatattcagctctggatggtcactgacaaactttgctgccgccccggtagaattggcgtattcatatggaacggaaggaaaatgtcgatggagaaatttatggcattgcgcaatcgcgtgtgaatgcgagtaaattctgtcgagctctttccatgcattctctcttgagggatgaacgagcaagtgctgatgaatcggcaacgtcatttcacccacgattggcaagggctgttcatgtattaaatagtctattgttagattaacagatccttctaaagcattttccaaaggaacaaaagcaaaatcaacttcgcctgcaacggctgcatctatacactccggaatggtgcggtaagcaacatgttcggcgccgttttgaaaacaagaactgactgctagatgtgtaaatgtagctgctggacctaaataaccgactttcatgacgattttctctcccttatgcacctgaacctaatatttcaaccttttctacaaaatcaaacttcctgagcttattcattaatgtatgaatgtcttcttccattgccgacgtactgatagacagtgtcacatttgctctgccttgaagcggaatggtctggtgaatggaaagaacgttgcttccagaatcagctaccgcctgaagaagctgagataacgcacctgacctatcctccaaatgaaagaaaagtgtgataatttgttcttttaccatggtgtagaatggaaaaacagcatccctgtatttataaaacgcacttctgcttaaatcgaccttttgaacggcatctgctactgaatctgctttttttcgatcaagcagctttttgacttctaatgtttttctcattgcatcgggcaatacatcttcacggacaagataaaatgtctcctctttcatttgcatcccccctttaaaatagagagcctggcaccaggctctcttttcagccaacattcattaatcaataaattcaaattcaaattccagaagcctgattatatctccatccttggctccgcgttctctgagtgcttcatcaacacccattccgcgcatctgtcttgcaaaccgtttaaccgattcatcacgtgagaaatcagtcatcttgaataaccgctcaaggctgtctcctgaaagcacaaatacaccgtctggatcgcgtgtaatgttaaatggcacttcttcattttccatcgtgtacatgacacggttttgtgtaagctcttcctcgtcatacagcgggaattccggtgtgttctcaagctgattggcaacctcaaacagaagctcacgcagaccttctcttgtcaccgcactgatcgggaataccggataatcatccgtcagcttttctttaaaggcttcgagattttccgcagcctccggcatgtccattttatttgcaacgataatttgcggacgctcagtgagacgcagattgtactcgctcagctcctggttaatcgtaagataatcctcatacggatcgcggccctctaagcccgacatgtcaatgacgtgaacaataaccctcgtccgttcaatatggcgcaaaaactggtggcccagtccgatgccttggtgtgcgccttcaatcagtcctggcaaatcagccatgacaaagctgcgtccgtcatccgtttcaaccatgccgagattcgggacaagcgttgtaaagtgatagtccgcaattttcggttttgcagatgagacaacagacagcaaagtcgattttcccacactcgggaacccgacaagcccgacatccgcaagcacttttaattcaagaacaatgtagcgttcttttcccggctcgccgttttctgaaagctgaggcgcgggattagccggtgtagcaaagcggctattccctcttccgcctcttccgcctcttgcaatgacagcccgctgtccgtgctctgttaaatcagcgatgacctgttttgtatcatcgtctgtcacaacggtgcccggcggaactttaataaccatatcatcagcatttcgtccgtgctggtttttggacatgccatgctcgccgcgaatcgctttaaagtgttttttgtatctaaaatccatcagggtgcggagaccttcatctacttcaaaaacgacgtctcctcccttacctccgtcaccgccggcagggccgcctttcggcacatatttttcacggcgaaacgcaaccataccgttgccgccgtcgccgccttttacatatactttgacctgatctacaaacataatgtcctccgttctaaaccgttaaaaactccgctagtccaacccaatctcaatcagacattcgtgactcgtgatttcaaaacgcatgatatcaacgtcctcatatccattctgccgaatatcatcaaaagcagatggatcggcaaaggcgccgtgaaaatcaaggtacagaatcagctgtctgtcaggatgatccgtttgaagcgaaaccgttaaatgattttcactctctctgctgactgcttgatcaaacagatgaaacagctttctcatcagtttcgccagcttttgatcataagccgacaaatccttaatttctccgagaacttcatattcaagcgtcatataatgggttttccaattaaacgtaagaaaatcaaacgccaaatgcggtgttttcaggtttgagagctttgattcgtgctttgcgtctataaccatttcttcaatcatttcaaagacgcggtcatacttctgcaagcttaagtttcctttaatcagctgcagcttattcatccaatcatgccgggaatggccaagcagatgaatcagttcgtttgttaatgccgtgtcgcttatattttcttcttgattttttgaaacatccttcattttcgcactcccaatcatttaatttcttatttaggagtctgtataagtgtgtattatgaattataacagagaaggctttgttagaaaaacaattgtttttcccagaaatatcatgttccttttttctggctttggttgatttgcagccaggcagaacattttatgtattactgcttggggaacatatccagtgggtttgagatgtttattctcattcttggcggggtctgctcgcacatactctgcatttcattctaggtgtttactccgcatattgcaaaaaaaactccagtcatcatcgaccggagttttttgaatcattattgagctacaggatatacgctcacttttttgcggtcacggccgaaacgttcgaatttaacagttccgtcgattttcgcaaatagagtgtcatctccgccgcggcccacgttttcacctgggtaaatttttgttccgcgttgacggtaaaggatagaaccgcctgttacgaattgaccgtcagcacgtttagcacctaaacgtttagcctcagagtcacgtccgttctttgtagaacctactccttttttagaagcgaaaaactgaagatctaatctaagcatgtagctcacctcctatattatgtttgtggtcacacgcaagttgtctttgtaatcccgttcgattgtctccagcgaaacaatcatgccttcaatcagcaactgagctttttggcgtgcctctggatcaagagattcagggaattcaaaataaaaataacccccgtcctcccctatatcaagaagcggctcgaagcccgcgagcacaatgaccgcgttaacggctccaaacacaacggctgtcactccggcacaaacaagatcttgtccatgttcagcaaaattcgcatggcccgtcatttcaaaagacaatatgcctttatcatgagacctcctgattgttgcctgaatcatgcttacgcgttgattttttcgatcgtcactttagtgtaaggctgacgatgaccttgttttttatgaacgtttttctttggtttgtatctgaaaacagtgatttttttcgcgcggccttgtttttcaactttagccgttactgttgcgccttcaactgtagggttgccgactttcacgttgtctccgccaacaaacaaaacgtcttcaaaagtaactgtttcacctgcttcagcagcaagtttttcgatgtaaacagtttggccttcttcaactttgatttgtttaccgcctgttttaatgattgcgtacattctctgcacctcctattagactaagactcgccagataccagggggctgtaaaagctcttaacacctgtactgagcggttgtagcaatggtgctacatccataacattaaaaaatataccaaaatacaagccgtttgtcaatcagttttagtagggcagaagcagttcctccatggaagaattcgtccgcttatcggcaaagtaagcgtgcagcacttcattctcgtcaagctggctgagcttttggcctgatttttctataataatcggatgcttacagccacgtttgaactcggccatcacatgatagactttatcctccgcctttactgtcagcggcagaagtttctcaagctccctgttttttccgtaatacctttcgaggagaaatctcacatggatatagtgcctttgccgatattcctcaaacaaggaaacagccagaaagacaaacaaaacccatgcgctgatctgcagaggaatcacgaataaaacccagcacccgagcaacaggcagaagcagagcgacgtttttagattaagccggtgagccttttgaaaaggcagctgtttggaaaacaacaaaaataacagttttcctccatccagcggccagatcggcagtaaattgacaaataagatagaaagattataaaaggtgaagagttcaaaggtatgctgatgaatcactgagacttctgcaagcatccaggcggcaaactgaagccagatgtgctgaagagggccggcaataatgaccgcaaactcttcctttaacggccgattcccgtgttcttccacttcgaccgttcccccaaacggcagcaaaaaaacacgcttgattctccaagaaaaaaatacggccagagcagcatgccccagctcatgaatcaatacaatcaggagcagacataataatgctttcatatggcctgtgagcaagcccagcgccgcgataatccaaagaaaaggatgcacatggatctttaagataaggtcgagccatttattcaaatgtaatcacctgaatcggatcaataaatttatcgccgtctttcatggcaaaataatagacccctttattatgatcatcaagcttaatcgaaccgagctttttgcctttatccacaaaatcatataaagcaacatccacatctttgagctcgccatagatactataggtgttgtcagcatgctgcaccttaaccgtcagtcccgtctggctgtctttgctgacttcaaccacatagccttcttttacactatcaatcttatcgctgcttgtttcgactttaattccttccccattgtcctgaaaatcctgctgtactttcccggatgcaggcgcgatcagatctttgcctacttcaatctgctgttccttatttttgtgttcaggagccaggaaagcaagcggatttccgaatttggtttcgaaccaatggcttgctgaagcaaattgaaattcagtttcaaaggttttggctacggcgggtttaatctgactgacgggtccaatgtttgttttataggctatagctgaaacgagaacaaggcaggccgacagaagacatttcaggataattgaatctgttttcaccaatgggtgttttccgttgaatgttggcatgttatcttcgtagaccggaagtgttccatgcttttcctgatccgttaccatcacccaggacgggggtttctgcttttcagaaactgtctgagtagagaaacgttttgagccggaaagctgctttcttcttttctctaatcgttttctgatttcatctgctctgtgactcattgccatcatcctttgcattcgttgggtttgtacatcatatgtcttgtccatggcaaatattcggtttagtcaggaacaaagcaggcaaaaacaaaaaaacctgacacagcatttgctttgtcagattcttctctttaattctatcacattaagatcttacgccgaaaaatgacttaatcttagccatcattcctttattttgctcttcaagcacctgtaaaggaacagattcacctaagatgcggcgggcaatattgcgatatgcaatagaagcgcgatttttcgggtccatcgcaatcggttcaccatggttggaagctttgatgacttcatcatcatcagccacgattcctagcaaatcgatcgacaaatgctgtacgatttcgtcgatatccatcgtgtcaccgtttttcatcaggtgatttctgattctgttaacaacgagccgcggcggttcaatattttcctcttgctccagcagccctataatacggtcagcatcacgaacagctgagatttcaggcgtagtgaccacaatcgctttatcagctccggaaacggcatttttgtacccttgctcgattccggcaggacagtctatgatgacatagtcaaattcctgtttgagctcttggaccatgtttttaatttgttcaggagcaacagctgtcttatcgctcgtttgagcagcgggcattaaatagagcagatcatcgaaacgtttgtcttttacgagcgcctgatgcattttgcatctgccctctacaacgtctaccagatcgtaaataattctattttcaagacccattacaacatcaaggttgcgcagtcctatatcagtatctactaagcatacgcgcttccctaaaatggctaaggcggtaccgaggttcgcagatgttgttgtcttacctactccgccttttcccgaagttattacgatagcctcacccaattcacattcctccctcaagccttgttagatcaggtcttaaatgagccaaatgttgaaggcgttcaatgaccatatttccgtctgtatctaaataagcacattccatttcgttccctttttgaatgtggtctggggagcgatttaacacatgattgattcttaattgtgtcggaagcatttcagaggcggcgatgaccgcttgattatttccattaaacccggcatgcgcgattcctttcagtgagcccagaacaaaaatgttccctccggccctgactgttccgccgggattcacgtcaccgatcaggagcaagtcgccttttacctgcagcacttggcctgaacggacaatttttgaaacagaaataatttcggcttcctctcttatctgctgtgcttcttttttagtaatgacttcactgtcaatagaatgaacaaacaaatctttctttgacgcaatcaattcggttagctgttcctcttgctccttatataaaaagcgatttcccagcttaacatgaacgctgattttctggccttttccatcggtatattgttcaattgacagcatattctgaagaccatcgagaagctcatcaaaagaacacgcatcatccagatgcaatgttagtccattctttgttccttttattgttacatattgctgctttttggtcttcacaatattcacctcaacaacatactcatttcgtcaaaaaaagataaaatcctttttactcatctctcaattctttctttagactcataaaaaacaatctaaatggcagaacaagaataagagctgctgcaatatttaataaaattgtcggtataaaccggtcaagcacaaatccgttaaacgtcataatatctttatgaatcaaagactgaatgccgaatacgtaaaattcgagcagacagacagccagaactgctatcaatatcactacaaatgcgtttgtatgtaacactttaaacgcttttgaagccaaatagcatagccctgcaaaaccaaacatgtaaacgcctaatagacttgtatagttcatgtcatatagaaaaccaaaaataaatccgtaaatcatcgcgtgtttttggttgataaaagccgacatgaatatcaatacaagcatcaaaaaacgcggggcgagcacttggtcatctgtaacgaaaggaaaatgcaccaaatctgtaaaaatgctttccgcagaaaaaacaagcatcataacgaaagggagaaggaaacgtttcacgatccttcctcctctgtatcgacagtcggcacgtcacggttaacaacgatcacattatttaaatctgtaaggtcagccgcaggttttacataagcaacctttgtcagtccataggaatctgactcgatatcagtcacttcaccgattgtcagcccttctgggaaaacaccgcctgtccctgatgtttcaataagatcgccttttttcacgtcttgtttatccttacgctcaataattgtcatcttaagacgttttttctctttgtcatatccttcgatcaagccgtagcctttgctgcctttttttccggaaatttttgtcgcgactctgttattgcggtcagtatcgcttaaaagctgaacagcagacgtaaaattgttaagtccggagcttttgatcttgccgattaatgcgcctttttcgtttgtaacggccatatctttcgctacgttttgctgagtccccttgttaatggtgacctgtttggcccaattatcagggcttctggcgatgaccgttgctaaaatcggcttgtaatctttaatcgatttgacatggccaagctcgtcacgcaaggatttgttttcttcttcaagctcttgaagcttggcttcatattgtgtctgtccgtcaagtttttctcttagacgctcgttttctttgtatgtgttttttaaatcattgatgttctcaaatattcctgcaaaaaattcggcaggcgtatgaaaaatattttgaaatactcccgtcgtatcgccgatcactttctcaggccaggtggtattgcggccgcccttcagcgaaaatccaatcatagccaccaatatgataatacacagaagtaatagcattaaccgcttattcggcatcgtgttacacctcttctattgaactcccgattatctagttttccctttgaaaagatggatgtgctccagtgctttccctgttccgatcgctacacaatcaagcgggtcttcggcgataaggaccggcatttttgtttcttcgctgatgactttgtctaaattgcgcaaaagcgctccgccgccggttaacactatacctctgtccatgatatctgctgcaagctcaggcggtgttttttcgagtgtgctcttcactgcttcgacaattgtagatacagtgtcgcgtagagcattagaaatctcttttcctgtaatttcaattgttttcggcagacctgtgagcaaatcgcgtccgcggatttccatgttgtcggattcttcaggagcttctgcagatccgatttccattttaatcgcttcagccgtacggtcaccgatcatcaggttgtacgtttttctgatgtagttgataattgcgtcgtccatctcatcaccggctacacggattgactgagacgttacgatgcctccgagggaaataatcgcaacttctgtcgtaccgcccccgatatcaacaaccatgcttccagtcggttcccaaactggcagattggctccgattgctgcggcaaaaggctcttcaatcggatacgcgtcacgcgctcccgcctgtcttgtcgcatcgataacagcgcgttcttcaacagctgtaatgcctgatgggacacataccattacatatggttttctggcaaacatgcctttattttttatggcttgattgatgtaatatttcatcatcgtcgccgttgtttcataatcagcgataacgccgtctttcatcgggcgaagagccaccacgttgcccggtgtccgtccaatcatatttttcgcatcatttccgacagcgacaatcgatttcgtatccgtctgcaaagcgacaactgacggctctctcacaacaattccttttccttttacaaaaacaagcgtattcgcagttccaagatctataccaaggtctctagcaccaattccaaacatatgtatgtatcttcctttcttaaagcaaaaataccctaaagggaaaaactcataaactctattatagcttaattcgacgaaaaaaaaagtgttacaaatatcctttttcctttaaactcacaaattttttatccccgatcaccaaatggtcaagcagctcgatgccaatcaggtttccgcattcaaacagccgtcttgtcacttcaatatcctccctgctcggcgtcggatctccagaaggatgattatgaacacagataaaggaagcggcagatcgtttaaacgcttctttaaacacctctcgcgggtggacaatagatgaattcaggcttccgataaatacggtgcgtttatggatgacttgattttttgtatttaagtataaacagacaaaatgctcctgggttaaaaagcgcatatcctccatgacgagattagcgccgtcttccggggagcgaataacgaaatgttcttcgttggctaatttgtgaatccggcttccaagctcaactgcagccagtatttgaatcgcttttaccataccgattcccgggatgcttgacagctcttcaaccgatgcttccttgagcagacgcagcccgtcaaatgagcgcagcagccggtttgacaggtccaaaacagattcgtgtttagtccctgtccgcaataatatagccaaaagttcatgattcgctaagttctcggctccgactttcaggagccgttcccttggcttttctttcattgggaaatctttgagttttaatggcagatcgcgtatgaccaagcactccttttctttcccttcccgtttatagaaccgtcatgcccttatatcaaaatggcgaagagctctcattgtttttgatataggaaggcccatgactgaataataatctccgtctattttctttacaaaaagcgcgcctcttccttggatgccgtatgcacctgctttatccatcggctcttttgtttcaatatatgtccaaatctcttcttcactgagggaccaaaacgcaacttctgtcttatcataaaaagtctcgctgtgattttcagcttgaatgctgaccgcggttattactgagtgacttcggcctgaaagcctccgcagcatagaagcagcttcttcttgatcctgcggtttgccaagacattcgccgtcaaggcataccattgtatcagcaccgataacgattgcatgcgggtggagatcagctacagccttagctttttgttttgccaaccattggacgttttcttctggtgaaaagtttcgatttaatttttcttctacttcactgacaataatggagtagggcagctgtagaagatcgaggagttctttcctgcgcggagattgtgatgccagtattagcggttttgtcatgttcgtcatcctttcagggtttgcttaagaaaaaaagatactcgtttatcctaccaaatcacgaggcttgtcacaatttcagaaaaataactttttcatgacaaaataaaaaaagcctgtcactaaaggacgaaggctcagggcactatctcttattttacgacggctaacagctcctgctgagccttccacccggcttcagcacttggatcctctaattcctttaaagcctgcaaaatcgcttttttctctcctgtttctgacgcttttgtttcaccaagcgacttttctattttctctacactcgcttttgtaatgtcttcgccgagaatcgcctttgctgcaagctccgctgtttccttaaaagaatctgtcatatctgactctattgataaggaaagctccttgcctccccaggcttcaaaatcactgtcgattaaaacctgtcctaactgctgtgagacatccttatcactggctaagcccgcgatgacatacgtatacccgtcatcctttgacagtgacacggcggaatatcctttttcggtcaattgttctgttaacgtttcggcgcccttttcatttgaaaattttccggcttgcacagcgtatgttttgtatgtaccttcagtttgtgcttgtttttctgcgtctgaggtttgtttatcagcagaagtatcccctgcttttgccgtttggctgcctagagaatcctctaaagaggccggtgctgacgcttctttattccccgatatgtttaacgcgaataaccctaatccagtgccaatgacagccgcgaaggcaatcgtcgcagccactctttttactggtttggcagtcccggtctttccttttgcataagactttgtttttttcttttgataaggaggaacaactttagggtcctctttaaacaccttgtccccctcggaatcccaattgaattcatcttcatcagggtgttcctgggatgccgcaacctcttgttctgcctgtcttttttcctcccaatttgaaaatgtcatgcttctatctgcctctgtatcaggtgtctcttgttcgtaaaccgtctcttcttttccattaatcgtcaccttgagggctttttctgcggctttactgttttttttattctttctttttttcaattccgcttcctcccttcatttgcttgaccgttcttgtcggcttttcatgctacacactttagcacaggcaaagaaaaaaagaacaagacttttgtcgccttgtccaaaaaacgttcgtcaaatttttcagcagtcagcccaatgccattttgatataaaaagaaatgatagagtcaccgtataaataggctaaaatgctccctgcggccatagcgggggcgaagggaagcggctgccttttagcgagtctaccagtcagaacagctgccgctccatataatgcacctatcaaaactgaaaagaaaaaggcagctgccagcattttcacaccaagcacaaagccaatcaccgcaaataatttaatatctcctccccctactcccccatgggtgattgcggcaattacagccagaaatagaaatccggctgccgcacctagcaggcctgcataccaggaatcaagcggagaaatcaatctcgcggccgccaaaaagggaagaaagaaaatcaatattcgatttggaatcagcataaaatgaatatctgtcactgcaacaataatgagaagagagataaacaccacagcgggaaacagttccagcgatgtgccaaagcgtattcctgcggcagcaaataaacacgctgtcacaagctctgctgcgggatacataaaagaaatcctatgcccgcagcttttacatttacctttttgaaataggaatgacaggatgggaattaattctgcaggagttaatgtccgccggcaaaacgggcatgatgaacggggcgcaataatagatagatgtaaggggatacggcacccggccgtatagtaaaaagaaccaaggatcagcccaaagataaaaagaatggatagcatagacaacacacctttactcattgagttctggtatggattgtagcaaaatggacatcctgagctccaattgggaatattcaattttacacataaaaaaacggcagaatcttttttttgattctgccgagccggatgcttttatttcaacctttttcgaatgtcagaaataaagtaaagagatccggtaatcagcacaatttcatttgagccctttttgctttctatgaatttgatcacatcgtctggatcttcactccagcttttattgctgatttcacttgcatcatagagatcttttgcaagagaagcacgcgggaaatcaaaagaagcaaaatgcatcgcatgagcaatggtttccagtcttttaatcatgttctgatacggtttgtcctttaacgcgctaaacaccacagaaatgcgtgaattggcgaaacgctgcttcatcgtttccgccagcttttcaacaccttcttcgttatgcgcaccgtctaaatataccggaggatgctcctgaacaagctctaaccgtcccggccaagcagccttcacaagcccgctccttaacgcttcgtcactgatatgggcgatattctccttattgagccactccgcagccaaaatggacaaagcagcattttgtctttgatgggtgccaatcagagatgtccgaatatcttcatagcatttctcttccgttttgaatgaaaactgttctcctgcaggcagagcctcttcattgaaaataacacatgcatcatgcaatgactggaacggcgcagcatgccgttcggcttcatggcggatgacctgtaaagcttccggctgggtaactgctgtaacgattggaataccttctttaataataccggccttttctcctgcaatttcttcaatggtgtttcccaaaatattcatatgatcgtgtccaatgcttgtaatcacagttaagagcggttcaaccacattagtagaatcgaatctaccgcccaaacctgtttcaaaaataacaaaatcgaccttatgaaattctgcaaaatataaaaatgcacaggccgtcataatttcaaattctgtcggctgtccgtattccgtttgatcaagggcttcaacgtgcggtttcatttgattgacgagtgctgtccattcctcatctgaaatcggtatcccgtttacgctgatccgttcattaaacgtaataatataaggcgatgtaaatgttccaaccgtatatccggcttcctgcagcatagaacggataaaagcgacagttgatcctttaccgtttgttcctgcgacgtggaacgctcggatttttttttcaggatgtcctaaccgcgccatcagctgtttcattcggccaagtccgggcttcaccccgaatttcagcctcccgtgaatccagctgcgcgcatcttgatatgcagtaaacaatgataatcccctcttttataagacaaggcggtttctctagaaaccgccccggcttttcattaacccttcagctcagccattcgtttttgaacagcgtcacgcttcgccacataatctttttctttttcacgttcttcatcaattacgtgtgcaggcgcttttttcataaatccttcatttccaagtttcttttggacacgctcaacttcttttgtcagtttatcaaattctttttgcagacgggcaatttcttcatcaatattgattaagccttcaagcggaagaataacctctgctcctgagacaacggccgtcatcgccttatcaacagcctcaatatcggtgccgattttaagcacactcggattcgtaaagcgttcaacatatgaacggttcgcttcgaggcgggctgctatttcgtctgtgcttgttttaatgtacagttcaacctgcttgctcattggcgtattgacttcactgcggatattgcgcacagaacggatcagctcaacaagaagcttcatgtcagctgccgcttcagtatcggtatgctccggcactactacaggccattgacttactgtaatcgattccccttggtgaggaaggtgctgccaaatttcctccgttaagaatggcataaacggatggagcagacgcatcgtttgatcaagtacgtaagcaaggatggaacgggtagttttcttagccgcttcgtcttctccataaagcggaagcttcgccatttcaatataccaatcacagaaatcatcccaaataaagttatataaatggcgtcctacttcaccaaattcatatcgatcagcaagctgggtcacgtgctcgatcgtttcatttaatcgcgttaaaatccacttgtcagcgactgacttttcgcctgagagatcaagctcatcgtacgtcataccatccatattcattaatgcaaaacgggaagcgttccaaattttattggcaaaattccaggtcgattccactttttcatagctgaagcgcagatcctggccaggagagcttccagtcgcaaggaaataacgcagagaatcggctccgtacttgtcaatcacatccatcgggtcgacaccgttgccaagagatttactcattttccggccttgctcgtcacggattaagccgtggattaaaacatctttgaacgggcgctcgcctgtaaattcaatgccttggaaaatcatgcgtgatacccagaagaaaatgatatcgtaccctgtcacgagaacatctgtcggatagtagcgtttaaagtcttcagcagttacatcaggccagcccattgtggagaaaggccatagcgcagaactgaaccatgtatccagtacgtctgtatcctgttcccaattttcgctgtcttccggcgcttcaagcccgacatatagctcgcctgtttctttatgataccaggcaggaatacgatggccccaccacaattgacgggagatacaccagtcgcggatgttttccatccagtgtaaatacgttttttcgaaacggtcaggcacaaagttgaccttttcttctttcttttgcagctcaatcgctgcatcagcaagcggctgcatgcgcacaaaccattgtgtagaaagataaggctccacaacagccccgcttcgttcactatggccgacagagtgcatatgatcctcgatcttgaagagaactcccgcctcctgtaaatctttcacgagctttttgcggcattcaaaacgatccataccttgatattggagcgcattttcattcatcgtgccatcttcattcatgacaaggatgcgttctaaattgtgtcggttgccaagctcgaagtcgttcggatcatgagcaggcgtaattttcacggcaccagacccaaattccatatcaacatagtcatcaccgacaatcggaatttcacgatttacaatcggcaggatcaccgtttttccgataaggtgtttatagcgctcgtcttcagggtgaacggcaacagctgtatcaccgagcattgtttcaggacgtgtcgtcgcaatttcaattgagcctgaaccgtcagcaagcggatagctcatatgatagaatgcgccttgaacatccttgtaaatcacctcaatgtcggatagggctgtttttgtcgctgggtcccagttaataatatattcgcctctgtagatcaggcctttttcataaagcttaacgaatacttctcttaccgctttgctcaagccttcatccagcgtaaaacgttcacgggaataatctaggccaagacctaatttcgcccactggctgcgaataaagtcagcatattcttccttccacttccacgtttcttcgaggaatttttcacggcctaaatcgtagcgggatttgccttcttcacgaagtttcgcctctactttagcctgtgtcgcgatgccggcgtggtccatgccaggaagccacagcacatcatagccctgcatacgtttcattcttgttacaatgtcttgcagcgttgtgtcccatgcgtggccaaggtgaagtcttcctgttacgtttggcggcgggatgacgacagagtatggctcttttgtctggtcactgcccgcttcaaaaaatttgccttttagccaaaaatcatatcggtctttttcaaccgctgccggatcatatttcgtcggcattgtttgttcattcgtttccatcataaccctccagcatgtttaaaaatggctgagaacgaaaaaagagctcttcatccctgtaaaaggacgaaaagctctttcgcggtaccaccttttttcatgaactctatcagttcatgcacttataacggataacgggtgtttcccgaatttctctactcttctttcaagaaattatgctcccgggcgaccttccaatcagacaacataagaagcctttcagcaaacggcttctctctctgcatgcgccttttttgtactcttcccgttctaagcaggtgtatttatcagctcattgtacattatttatgttctttattatagtaaaagtgtttttgattcgtcaatcatcttttccaaaaacaccgctttctatacagatgggcaggcacctattgcccaagtttacatatgatgcttgtaaatgcgtagaggaggatgcaccgtgaagaaacgtttcagctcttattcgctgccgccatgggtaaggcaaattcggcttgtatccgcacaagtgattattcccattacgatttttcaaggaatcagaaccattttctttccgacaacctttgatgttttgctgctcgcaatcctaatctttttagcttgcgcccttcatttagaatggatataaacaaacaagtccgcgccattaagacgtggactcgttttcagcctgaaattttttctcttgttcaatctgatgaattttcatcacaaacggctctatatttttcatttgccaataagcctttaataattgtgtacattcctctttttcatgctgtcgtttcccagtttgataaccgttcagcaccttgtacatggctgccggatatgccatatagctgagaaaaaggctgacttccgcttcacgcaaagggaatgatttcgtatatccataaaaccattcgacgcattccggacaagctttcggaaagcctctgaacatttttgtataaaagccgagcaggtcgttttgcggaggaccgacagatgctctttcgaagtttgtaaaatatccggtcccagcatcattatacagaaaatggtgtatagacaggctgccatggttcattacaacccttgaaacgtccttttcctttgcagactcataccagtcctccagccgttccagcgcaaagttcaccgcggaaatggtttctgaaaaataggttatggcctggagttcaaaaggagaaaggtaccattccttctccgctctatccacaaactgctcatagaaaattttatcttgttcccacttttttttcgtttgcccgtaataacgttcaatctcatcacgtctaacctttagttcctgcgcggttctctcgtgaagacgggctgtttctctaaataaataagcatgtttctgatcccgttcttcctcttggtcaaattggagccaaggcattaaatagtaggtatctccgtattgtatgcctgctgagaaaaactcaccgctatttgttctgtaaacgggaacgaatgaacgaaagcctttttcctcaatcgccaccatatgatctgtaaaatgcttgccgcgaccttctttcaattttttcagggcaaatatgccgtagtctgtatacactttccaaacaagaggactgacaggctcaataaattgagcagtcagtccgtattcctgaagaaccgattgggtatcttccatttcattcaccacattttccgatcacttacggtttacgcatggctatttttatattgaggaatatagagaatctgtcctgcttttaattcatcatccaatgctaaagaattcatcctgatcagctgctgggatgtaatttcataccgttcgcataaacgctcgatcgtatcttcctgctgcacaatacaaattttcattctcgaaaactcatccgcttcttttgtaaagagttttgttaaataaagagaattatcactttcctttgtttgaggttccttcgtttcagcagcaggagcaaccctaggaacagcatccgtttccttcctttcagtctcagaagattcaggcagctggaaggattgaaaaggtgtttcttccttaggctcttcaggtgatggtgtttttctcacttcaatttcgaagctctcttcctcttgttcttcctcctccagcagcttaggcgctgaataaaaagaatcctcctcttcttgttcagacaggaaggtacggtatgccggttcaggcaattcttcttgagatgcctcctccgagcttgttttttgattgaaatggaaatgtaaatcggctttgtcattctccacatatgcagctgaagctgtttctctgctatcttctatggagagagcagcctctgatacactctccaaagcttcatccgcttccgcctcttcttggcaaagcgcaggatcagcctgatccgattgagctgcttcttcattttgagcctcttggcgcagcgcatattcatgattaggagacactgttgtttcctctttttcctttgcaatcacagtctctgaatgaagctcagcttccaaagcaggcgattcttctgctccagcgtgttcacgaggctcagtctctgctggagagtctgcttcttcacgaacatccgctattgcagctgccggctctgccgtttctttttttgctttaacgatctcttgaatctctatttctgaaggatcaggttctggctcagattcttctgtttccgattcagcacgaacctccttttccgcagcaagctcttctgactcttcttcctctttcacatcttctctggcctctggatctgaagcaaccgattcaggcggctcagattctgctttttctgtctccagttcttcacggagccccgctttcgagataaaaagttctggcggttcggctggcggttcatgctgaagaactgcttcctctgccgatgatgcacccggttcttctactacactatgtgccggcggctctgaaagctcttcctccctgaatgccgcaggagcttcatataaaggtatctccggctctttgtcttgcgtatcgtccaaaagcccttcgatcgctaaatcagcttgaattgttaaaatgcgcgaatccgtcaattgatagtcaaatgcgtcaataaagacgaagacatcctgtaaatggctcactttatttttcggaatggtaatatccacaggaaaacagtgagtcagttccgcacttccatcctctctctttctgacttgttcaacaaaccgcttatctgtataaatctcttcggtatgtttgttttgatctatgttgtactcacctgtaagttcaagcgatcctatgattgatacataatcatttacttcctgaaccctaatatcaggatctaatgaaatagaaagcagttcagaaacttcctgtcctttttggaaacagatcgattcttctacagaaaattgcaatcgatgattttgtggcaagttcatatcctcctttcatctaatccttaaaattagatgtcactaaaggtgtatgtatgaactggagaaaatatgagtgggagagcacgaaaaaaccggcacaaggagtccttgataccggttttcactcttatctgcggctgatctcagcaaatactttctcagctgcctggattgtgttttcaatatcttcatcagtatgggccgttgagaggaaaagaccttcgaattgtgatggcggaaggaataccccttcatttgccatccctttataatagcttgcgaacagcttcaaatcagatgatttcgctgtttcataattgatgactggttcgtttgtaaagaagaaaccgatcatcgaacctgcacggttaaaggtatgcggaatgccatgagcctcggcggcttttgaaattccttcttccagcctgtcgccttttttgatgaaattcttgtaggaatcaggtgtcagctgtttcaatgtctctaagccagccgtcatcgcaagcgggttgcctgacaatgtaccagcttgatagatcgggccgcttggagcgatctgctccatgatttctgcctttccgccataagcgccgacaggaagtccgcccccgattacttttcctaaacaagtcagatcaggcgttacgccgaagtagccttgagcgcagttataatcgacccggaagccagtcatcacttcatcaaaaatcagcagggagccgtactgctcagtgatatcacgcagaccctgcaggaaaccttcttgcggcggaacaacacccatatttccggcaactggctctacaatgactcccgcaatgtcttcaccgaattgctggaaagcaagctttacactgtctaaatcattgtacggaacggtgatggtgtttttcgcaatgccttcaggcacccccgggctgtcaggcagaccgagagtggcaacacctgaaccagctttaatcaagagagaatcgccgtgtccgtggtagcagccctcaaattttaaaatcttgttgcggcccgtatagccccttgccaaacggagggcactcattgtagcctctgttccggagcttaccattcggacgatttctacagatggcacacgatcaatgacgagcttagcaagttcattttctacttcagtcggagcaccgaagcttgtcccgtattcagccactgttttgaggctttctacgacgcggtcatttgtatgccctaaaattaaaggcccccatgacaagacgtagtcaatatattcattcccgtcaatatcaaagattttcgagccttttccgcgctccataaaaatcgggtccatgtctaccgatttaaatgcgcgaacgggactgttcacaccgcccggcatgagtttttgcgcttctttaaaagccgtttttgatttttcatagcttctcatctgcctcaactcctgtcaactgaataaaattactccgcaagccatttcgctgcgtctttcgcatgatacgtaataatcaggtcggcacccgcgcgcttcatgcttgtcaaaatttccaacacaatttctttttctttgatccagccgttctgcgctgcagccttcaccattgaatactctccgcttacattataagcgacgagcggcaaagtaaactcattttttacgtcacgcatgatatccatataagaaagcgaaggtttgacaatcaaaaagtccgcgccttcctcgacatctgattgtgcttcgcggagtgcctccatacggttggcagggtccatctgatatgttttgcggtctccgaattgcggtgtgctgtttgctgcatcacggaacggaccgtaaaactcacttgaatatttaacagcgtaagacatgatgggaatattgacgaatccttctttatcaagtgcttctctgatcactgtaacaaatccgtccatcatgtttgatggcgcaatgatatccgcacctgctttcgcttggctgacagctgtctgcgccaaaagttccagcgattcatcattgaggatgaccccgtctttgacaagtccgcaatggccgtggtctgtatattcgcacaggcacgtgtcagcgacaacaaccatttcagggaagtgttctttaatttctgtgatggctttttggacaattccgtgatcatggtacgcttgtgttccgcaatcatctttttcttccgggatgccgaacacgataacagattgaatgcccagtttgaccagctccgctacttcatccttcaataaatctaatgatacatggtaaacatcaggcattgacggaacagcttttttgccttccagcccttcaacgacaaaaatcggataaataaaatctgatggatgcaaacgtgtttcctttaccatttctctcattgcttttgatgtccgcaggcggcgatgtctattaaatgattgactcatattctctcttcctctcttgacatgctgcacattaattcaagcatgccatctattgtaaatgtatcaggcgtatgcgatgtgatgccgtacgtcagaagggcatcatttgttaaaggcccaatgctgatacaggccgtcccattcgccttccacttttttaattcttctcccaagacatgcataaacgtatgtacggttgatgaactcgtaaatgttacatagtcaaaggaatattgacccgcagcgtctttcagtgcctcaatgccttcttcatccggaatcgtttcgtagagaacccattcctttacttcaaaaccgagcgggacaagctcttgttttatcacatcacgtgacaaattccctttcatcacggtaatgggctcccccggttcagcatgctgcttaagagcgtcagccaattgttcagcaatatactcctgtggcatcacatcaaccgatacgttatgcgtttttaaacggcgggcggttttttcaccgacggctgcaatttttttatgcgcagggagaataagctgattttccttcagataagaaaaaaagaagtctgccccgttcacacttgtaaaaacaagccagcctggcgcggcaagatcctctcttacctgttccgcaacatcattcggcaaagcgcggcgaaacgtaatcaaagaggttaaaaccgctttaccgccaagcgcctccactttttgctgaaatgatgttgcctgtgccttattccgggtaacaagcactgtttttcctttcaacggaaaatcattttccatcctcatcaagctcccgttttacacgatcaattaaatcttttgctcctttgtcagccataagagcggcacagcgctttcctacttcctccggatcgtttccggtgacggtttctttaaaaatgattttgccgtcaggtgaagcgacaagacctgtcatttcaatttcatcctgtccatttaacacggagtagcctgcgatcggaacctggcagccgccctccatcgcgtttaaaaaagcacgttccgctaagacagtccgttttgtatattcatctgtaaactgagaaaacaacgccaacagctcttcatccgattctcggcactcaatcgccagtgctccctgccccacagcaggcaaacagcgctcaggctcaaggaattcggttacgacatcttgcttccaacccattctagaaaggccggcagccgctaaaataattgcgtcataatcctctgtttccagcttttgaagtcttgtatctatattacctctaatccatttaattgtaaggtcagggcgctcaatcaaaagctgcgcgcttcttcttaaactgcttgtgccaacgacagcaccttccttcatttctgaaagctttacgcgattctttgaaataagggcatcacgcgggtcctcccgttcaggaatacagccgatcacaagaccttcaggcaaaacagcaggcatgtccttcatgctgtgcactgccatatcaatctcttcgtttaaaagcgcctgttcaatttctttgacaaacagcccttttccacccacttttgagagtgtaacatctacaatccggtcgccctttgtcacgatctctttaatttcaaaagcaaacgaaggattgatttccttcagtttttgaataacccattttgtttgagtcatagcgagtttgctccgtctggaacctactttaatcgttctcatcatttctttcctcccgaatctgcttgggacatcgtttaactgaaccaatggaattgcgacaggcttccaagcaggaaataattgatcatcagcaccagaaaacaagccgtattccacagtgctgcgacctttccttgcagctctttaatcagcctgatataaagataatagctgtacagcagcaggacgacaaacgaaccaagcactttggcgtcaaaccaatacagcgtttctagtgagacatacgcccaaatgacgccgagaatcaaactcagcagcagcatcggaaccccaatgacatttaaaacatacgccatataatcaagcttagataaatcttctattctcaacagccattttccccactttttctttttcagcagatgatattgaaacatatatagcacagaaaaaacgaaagaaagggaaaaagcgccgtatgaaagaatcgccattgtaatatgaatcaccaaaagctcggatacaagctgcccggaaaaagcagctgactgctgctctgtcggtgaaaatgtgtgaatggcgatcatagaaaatcctataacatttgtaaaaaacacgataaagtcaacacgtaaaagctttgtcagtacaagtgacagcgtgacaagcacccaggcataaaaataaagcgcctccgtcacatttaataccggaaaccgccccgtcacccacataaaataggccaaatacacggtttgcagagtccagacaatagaaagcaaccagaaggccatttttccagccttccggttgtgttgaagaaaatctataaaataaaagagtacacttaacgcgtaaatgacgattgtcccctcattaagtcttgccattgcagtatcaatcattcagctttcactcacttacaagtgggctaaagcccgcttttgattcagccttcttaaaagagtggaccttctggctgctttccacggttttcatcatttgacggcccgcagcttcttcaatatcaaaaatctgcataaacaacgcgagcttttcttcagaatcagcatctgccgcaagctctttcacctttaaaatcggatcacgaagcatttggttaataatacttttggtgtgtttgttcaacagttttttctctcttgtgcttaagtgaggcagcttacgctcaatgctgtccatcgtttctgactggatagcaagcgccttttcgcgcaatgcagaaataaccggcacaacaccaagtgtattcatccattgtttaaattccacaatggtttcttcaattaacagttcaactttttcagctgtttctctccgctctttcatgttcgcttctacaatgccttccagatcgtcgatatcataaagaaaaacaccttcaagatcattcagcgccggatcaagatctctaggcacggcaatgtcgaccataaacagcggacgtcccttgcgaagcttattcgcgttttccatcatctctttggacacgacaaattcacttgcaccggttgaactgattaaaatatcagcctccgcaagcgcgctttcaagctgattcaagcttctcgcttcacctgagaaacggtctgcaagctccttcgctttcaagtatgttcggttaatgacagtgaccttgccgattccctgtccgtgcaggttttccgcagcaagctcgcccatttttcccgcaccgagaatcaatatgtgcttgcttgaaagatttccgaagatttttttagcaagttcaactgcagcatagcttactgacaccgcatttgagccaatgtctgtttcggcgtgagtccgtttgcccactgtaaccgcctgcttaaacagctcattaaaaatagtcccgatcgttttttcttgctgagctgttttaaagctgtcgcgtacctgtccgagaatctgcgtttcgccaatcaccatagaatcaagtccgcaggctacacggaataaatgctcaacagcggcatcgctctcataaaacgttaagaacggtgacagctcttctttgcttaattgaaaccaatcagctaaaaacttttttatataataacggccggtatggagctggtcgactaccgcataaatttcagtgcggttgcaggttgagacaatgatgttttcaagaatgcttttctcttctttcagctgcaccattgcttctgccagctcattcggctgaaaacttactttttcacgtatctcaataggggcggatttataatctactcccacaacaagtatatgcatcgctctaattacacccccaacgcccaatcttaatttataatcattctaacatagaactcattatttataataattataacatagtttctttcacaaaatgtgaacagattttaaaattcttatgctatattagaaaaagcttcagggaaaagaagcattcctattgacaataccaaaaacagcagaaatttactacacatcagctctaaaaaacaagaaggtgatatgcatgaaacaaaaatcaattttattcccttgcctgctgcttgccgcttctgtatatgcatggcttgaaagcggccaagctgaactgttttcgggacaggatcaatggcctgttctcctcatgctgttaggagcagcctttgtatatcaaggaaaaaaagaagccgttgcaccccatttctttatcggtttgcttctcttcgggatcggtttacacttttttgccaagccgaaatgggtatggtggccggatgattttgaaatgcttctctttatgatcggcttctcactactcgtttcaaccgttcaaaaaaaagaatatgtatatgaagctgtgtcgatgatttgtttttccctgtttttgtactttttcaaacaaattatggcatggcttgagtctgcgcatattccaacagcgcttctgaaggagtattggccgtttgtctttattggaatcagtttattgttattattgataaaacgaaaaaaatctatacgataaataaaaccggtagaggatcctctaccggtttatcatttttttgatcgctccccaagcttcgtcttttccctttttcgtttctgaggaaaagagaatcagctcgtcttccggatcaatatttaatgtttgtcggacaaccttcgcgtgtttgtcccatttgcctttcgggatcttatccgcctttgtagcgataacaataacaggaatgccgtaatactttaagaattcatacatctgtacatcatcattagatggcgcatgccgcaaatcaacgatctgcaccacagcttttaattcctcgcgtgtcgtgatataggtttcaatcattctcccccatgcttcacgctcagactttgacactttggcaaaaccgtagcccggcacatccacaaaatgcaactcatcattgataatgtagaaattaagtgtttgtgtttttcccggctttgatgacgttctcgcaagatttttgcgattgattaatgaattgataaaagacgattttcctacgttcgatcttccggccaatgcgatttccggaagccccccttcagggtactgttccggttttactgcactgatcacgatttctgactttgtgactttcatttcttctctcctactaaggcatgttccaaaacctcgtctaagtgggacgccaatataaatgtcagcccctccctgacgctttccggaatatcctctatatctttttcattatctttaggcgcaataatggtcgttaatcccgctctatgtgcgccaagcgctttttcctttaagccgccgatcggcagcacgcgcccgcgaagcgtgatttccccagtcatgccgacttcacgcgaaaccgcccgtcccgttaaagcagaaacaagcgctgttgccatcgtaataccggctgacggaccatcttttggcaccgcaccctctggtacatgtatatgaatatcatacttctcatgaaagtcaggttcaatgccaagttcttctgttttggatcgcacatagctgaatgcagcctgagcagactctctcataacatctccgagctttcctgtcaggattaatttccctttccccggagaaagcgatacttcaatcgacagcgtatctccgccaacggttgtataagcaagccctgtcactacaccaacctgatcctctgtctcagcttgtccatatctgaaaatacgttttccgataaagtcttgaaggttcttctcagtaaccgtaatccgttttcgctcttcagcaacaatggcttttgcagctttacggcaaatcgcggcaagctggcgttcaaggcttctcacaccagcttctctcgtatagtagcggataatatcaagaatcgcctgatcacgcagctgcaggttgcttttcttcagcccgtgttctttgatttgctttggaagcaagtgatcctttacgatttcaagtttttctatttctgtgtagcctgcgatattaataatttccattctgtctctgagcgggcccgggattgtggccaaattgttcgccgttgcgataaacagcactttggataaatcaaaggtttcttcaatatagtgatcactgaagctgctgttttgctctggatcaagcacttcaagcatagcggatgatgggtctcctctaaaatcagatgacattttgtcaatttcgtctaataagaagaccggattcagcttgcccgcttttttcatcccttgaataatacgtccaggcattgctccgacataggtccgtctgtgtccgcgtatctctgattcatcccgtactcctccgagtgagattctgacgaatttgcgtcccaagctttttgcaattgatttggctaaagacgtttttccgacacctggaggtcctgccaaacagagaatcgggcctttcagggatttggtcagcttctggacagccaaatattctaaaatacgttcttttactttttcaagcccgtggtgctcttcgtccaagagacgtcctgcttctttcaaatcaagcttatcatctgtttcatccgtccacggaagagcaaccagccagtcgatatagttgcggatcacagagctttccgcagaacttgacggaattttttcatatctgttcaattctttaagcgctgtttctttcacatgatcaggcatgcctgcttcttcgattttttccgtcagcgtctgaacttcgccagttttgccttctttatcgccaagctctttttggatcgccttcatttgttcacgcaagtagtattccttctgcgtacgctccatcgaacgtttgacgcgctgaccgatttttttctcaatctccagcacttctttttcattattaataaaatcaatgaccttgttcagcctgtctttgacatcagccgtttctaaaatatcctgcttatcctttagtttaaggggcagatgagaagcaacgatgtctgccattctccccggctcttcgatatcagtaaccgcagcgtacgtttcggccgagatttttttagaaatttttatgtactgatcaaagtggtctagcaaagtccgcatcaatgcttcgtcttctgtatcttttgaatcatcttcatgaataagttgaatgtcaaccgacgtgtaatcctcgtgttcattgtatttgacgatatgggcgcgcttgaggccctccaccaacacacgaatcgtaccgttcggaagcttcagcatttgcttaatttttgtataggtgccgacagtgaaaatctcgtcttcaccaggttcgtctatcgaaatatcctgctgagtggctaaaaatatcatatgatcatgcatcattgcctgttcaagagcctgaaccgacttgtcacgtcctacatctaaatgcaaaaccatcgtcgggtacactaataaacctcttaaagggaggagcgggatgctgcgttttaattcttctgccatgtgactgacacctccgtgactttagtatgaaccattataatacaactttttcatccttgtacaataaacggcatggttccattttctataaaacagtctcctcgtagtataccctttctttctgatatgaaaaaggaaaagatgtccttcatgaaaaaaaccctattatcaaaatagggtttaaacggattctttattgatttcgatatgaaacggtttttgttccgttggcggattcaccaaaatttcatcaagcacttcttggaacgtcttcactgcaataatctcgatcccgtcaatctgctttaagatggcctgctgattttcatatgggataatcacctttttcgcaccggactgcttggccgcttttattttcggaatgacgcctccgatgggtttcacaagaccgttcaggctgatttcgcccgtcatcgcaacggtattgtcaataggaattttgtgtatcgccgagaaaatccccgccgccatcgcaatgcctgctgacggcccatcaatcggaatccctcctgggaaattgatgtgaatatcataatcagaaggcttcattcccattgtccggagcacggttaatacattttcaaccgaacccttcgccatgctttttcgcctgatcgattttgattggctgccgatgctttcttcttcagctattcctgtgatgttaattgatcctttatcttgagccgcggttacacttacttcgatttccagaagcgatccgctgttaggcccatagactgcaagcccatttacaatgccaacctgtggttcaacaccgattttttgctcgtgctttggagtaagctgactggagtgaatgacccattcaatatcctcaatcgtaatgtcctttcgattctccgttacagccatccccgctgcgatttgaatcatattgacggcttcccgcccgttccgcgtgtagctggtcaaaagatccagtccttcttcggagataattttttcaattttatccgctgctgttttggcaaccgttttcaactcgtccttttcaagctcgcggaaaaaaacctccaaacagcgggaccggatagctggcggaatttcgtttggcattctcgtggtcgcgccaatcaagcgaaaatcagccggcagcccattttgaaaaatatcatgaatatgattcggaatttgtgtattttcctcactgtaatacgcactatctaaaaagacttttctgtcctcaagcaccttcagcattttattcatttgaataggatgcagctcccctatttcatcaataaacagcacaccgccatgggcatgggtgacagctccctgcttcggctgcggaatcccagcctgtcccatcgctccggccccttggtatatcgggtcatggacagagccgatgagtggatcggcaattcctctttcatcaaaacgggctgttgtcgcatcgagttccacaaagacagcctgctctttaaacggtgattgtttatgtttttttgcttcttccaacacaagccgcgcagcagccgttttcccaactcccggtggcccatagacaatcacatgctgaggatttggcccgcataaagccgcctttaatgctttaatgccgtcttcctgtccgacgatatctttaaagcttttggggcggaccttctcagataatggctcggacaagctgatagcgcgcattttccgaagctgctccatttccttctttgattctttatctatcgtgaccttttgtgtcctttgatttttaagcaaattccaaaaatacaaaccgatgatgatcccaaaaaacagctgaataaataacgcgatccctgtccaactcatggtggtccctcctgaaaaacaatttatgtatccaattcattcctctgattgctagtatctcccatagaagacgggaataaacgtttttccggaagagttgcatgcaaaaaaacctcctgagtgttaccactcaggaggtttgtgcttatctttatgcagatgttttatcttggcttacctcagtgccgtcttttaataagaggcgaggaggctctccgtgtgtcacagttgccccggtgattacacatttttcaatgtcatcacgagaaggcagctcaaacatcacatcaagcatgatgccttcaatgatggaacggagtccgcgtgctccagtcttgcgttcaattgcttttttagcaatttcagaaagcgcttcttcttcaaactcaagctcaacgttgtcaagctcaagcattttcttgaattgcttaactagagcgtttttcggttttgttaagatcgcaaccaatgcttcttcgtcaagcttttcaaggcttgcaataaccggaagacgtccgataaattcaggaattaacccgaaacggagcaaatcttcaggaagcacttttgaaagaagatcttctttctcaagatcagcagctttattgtcggcaccgaatccaatcactttttggcctaaacggcgtttgatgatttgttcgataccatcgaaagctccgccgcaaatgaacaaaatatttgttgtgtcaatttgaatgaattcttgatgaggatgcttacgtcccccttgaggcggcacgcttgccactgtaccctcaagaattttaagcaatgcctgctgtacaccctcacctgacacatcacgtgtgatagacgggttttcagattttctagccactttatcgatttcatcaatatagataatgcctttttcggctttttccacatcataatcagcagcttggatgagcttcaagagaatattctctacatcttcacccacgtatccagcttcagtcaaagatgtagcgtctgcaattgcaaacggcacatttaaaatgcgagccaatgtttgcgccagaagggttttaccgcttcccgtagggccgattaatgaaatattactttttgagagctcaacatcatcaactttgctgttagagttaatgcgcttatagtggttatacacagcaacagcaagtgatttcttcgcttgatcttggccgatgacatattcattcaaaatttcgcgaatttcctgaggctttggtacgtctttaaattctacttcttcttctgttccgagttcttcctctacaatttcagtgcagagttcgatacattcgtcacatatatatacaccaggtccagctacaagcttacgaacctgatcttgtgtttttccacagaacgagcattttaattgtcctttttcctcgttaaatttaaacattctttcaccccttaatcttgtctcactttttcttttaccggcagagcaaaagaaaatgattcttgaaacgaacgagtatgtattgcattttaccatactttccaaaaagacggtaacaatgtgtttctgacttgcacattctatatgtatgacaaaaaacagccctgcattaactatattgccccaagaaaaagagataactcataattgtacaaaacaaggcacgaatgattcgcgccctgttttattagtactattattatgcaccatattaacggttttctacaagaaaatcaattgctttgcgaacttttaaatcttctttcatcgcgtcagtagaaccgatggcttgtttaatattttcaacaggcatgttgtatgcttcagccattttagtaagctcagcatcaacttcctcatctgatacttcaaggttttccgctttcgcaatcgcctcaagagtcaggttagattttacgcgtttttcagcatcttctttcatttgctctttaagcgcagcttcatcttggcctgagaattgagtgtaaagctcaaggttcatgccttgcatttgcagacgctgttcgaattctttcagcatgcggtcaagctcagtgtcgaccattgcttgcggaacatcgatttcagcattttcagaagctttcagaacaagctcttcacgcaatttagcgtcagcttcgttttcttttgcttcttctaaacgtttctttgttttttcagttaattcagcaagtgtttccacttcttcatcgatatcttttgcgaattcatcgtcaagctcaggaagctctttcgctttgatttcgtgaattttcactttaaacacagctggtttgcctgcaagatcttcagcgtggtactcctcagggaatgtcacttcaacatccttctcagcacctgcttcaaggccaactaattgatcttcgaagccagggatgaatgagccagaacctacttctagagagtagttttcagcttttccgccttcgaaagcttcgccgtcaacgaatccttcgaaatcaagaacaactgtgtttccttcttcaacagcgccttcttcttttacaacaagctcagcttgacgctcttgaagggcttttagttcgttttgaacatcttcgtcagttacagttgtgtcgtctttttcaatgcccaggcctttgtattcgccaagcttcacttcaggttttactgttactttcgcagtgaagattaagctttcgcctttttcgattttttcaacatcgatttcaggacggtctacaggctcgattccagcttcttcaaccgctttagggtattctacaggaagaagaatatccaaagcatcttggtaaagagcttctacgccaaagcgctgttcgaataatccgcgaggaattttacctttacggaatccaggaattgaaacttgttttactacttttttaaatgcatcatcaagtgctgttttaaacgtttcagcatcaacttcaaccgttaaaacgccttcgttgccttcttgtttttcccattttacagacatgtgtttccctccaaaaatctattcaggttgtgtcggtcttccattctaaagcaatcattcggcttcgtccaacaaaaacaaagctgccaaagatcagaatcattatgtatagatgttaataatgaactgcaaagcctgtccaaccgtatttcttataacccgttatacacaaatacaaccactatattataacataacacatagcgctttcaactatatggcgcgatttacaaataagaaatttcttcaatatcttttaacattgtgcaagcttcatcgagttctctgtcggtaaattcatacatcatatgaagttcttctctttcaatttcaattccgtgcatctcgtaaccgactttatgcagggcagccgcccaaaggtcagccgacagcaatttcggctggaacggatataaaacgtacaaatgtcttctccacaattcttctactgccgcgtataaggttggattttcatttccaagtgtttcatccagcaccctgagaacacggtgcagaatcggcgcggcatcaggcggaacaatctcagacggttcaattgtcaacgactcgccaaatttactaatgtgtacaggtttactgtactcatgctcagctaacagcatgacaatcatcgttttgataatcggatgggctgaggggtcttggaggattgttttgagcaatcctgtatactttgctacgttacggtcttttaaggaatggatgagattcatttgctcctcagggcttgccagcactttctcggtgtcaattgtatcctcatattcttcggcccaagcctcgtcctcacgatctggatcggtcattttccggctgaaatccagcagcttataaaattgctcggcgctttctgccggcagctgattttcttccaaaacggcttcaatggtgcttttgacttcttcgtattttttgagctgaattaagatggtcatgtacacctgcaaaaccgtaaaataatggccataaccttctttgagcatcttctcgcacacgctttctgcctcttccagctcgcccagctctaaaaagcagatggccatccctaagtgaagatcggattcagtatcatcatatttcatcgcttctgaaaacagttcaagcgcttcttgatactttttttccttgagtgatgacatccctttttccacaaggcggtctttcagatgaggaaaaggaataatttttgcgtttttcttgtcatgcgtcatacctatattcctttcaggcatttattttgttcaagtgtatcaacacctgtgaacaaacacaagaaatgaaaggtttcaccaggcaaaaaaagccgccggacaaataccggccgctttttcagtcttgaagccaagagcttctttgtgattcaaattgcttgatttcatcttccagcagcagcgttaatgaaatttcatcatatccgttgatcagcatctctttccaatgcgggtcaacttcaaatgaaatttgattgccttcactgtcatgaatcagctgattttcaaggtcaacagtcatttgcaatgacttgttttcatactggccgacaagctgtttccaattgtcatatggcatgcggatcggaagcatgccgtttttaaagcagttctgatgaaaaatatcagcaaatgacggcgcaatgataattttaaacccataatcatcaagtgcccacggagcgtgttcacgcgatgacccgcagccgaagttttctcctgctattaaaatggaagctccttgataaacaggctggtttaattcaaattcagggttcggttcaccattcgcatcatatctccagtcaaagaatgcaaaacgcccgtagcctgttctttcaatcctcttcaaaaattgcttaggaataatctggtctgtatccacattgatccgatttaatacggctgctttccccgtatgtgatttcaaaggttccatctcgcgcactccttacacaactgttttttcctgataaaactttctgacatcaacgaagtgtccgtgaatggcagccatcgcagccattgccgggctgacgagatgtgttcttgcaccttttccttgtctgccctcgaagttgcggttagaggttgatgcacagcgctctccctcaggaacaacatcattattcatactcaaacacatgctgcagcctgactctctccattcaaatccagcttccaagaaaatctggtcaagcccttctttttcagcctgaagcttcacgctttgagatccgggcacgacgatggcccttacgctgtcagctaccttcttccctttgatcatatcagcagcctgtcgaaggtcagtcatgcgggaattcgtgcaggaaccgataaatacgtgctccactttaatgtcttcaattttttggtgaggagtcagtcccatatattcataagcgcgaatcgcttcttttttatcatcttctgcagaaaagctttccggcgcaggaacttcagaatcgacaggaagaaccattcccgggttaatgccccatgtcaccataggggaaattttgttgccgtcaaggaagatagatttatcataaacagcgcccgggtctgtgcgcagcgccctccattcctctacggccttgtcaaattcttcgccttttggcgtgtacttgcggtttttgcaatattcaaacgtcacctcgtcaggtgcaatcaaacctgctcttgctcctgcttcaattgacatgttacaaacagtcattcgttcatccatcgtcatatttctgaatacttccccagtgtattcaatgacgtagcctgtgccgaatttcacaccgtatttgccgatgacagaaaggatgacatcctttgccgttacccctttttgaagcgttccatctacgcgcacttcaagtgtttttggacgctgctgccaaagtgtctgtgtggaaaggacatgttcaacttcactcgtcccgattccaaatgcaagagcgccgaaagcgccatgtgttgatgtatgactgtcaccgcacacaatcgttttccctggaagcgttaagcccagttcagggccgacgacatggacaatcccttgatccacactgtgaagatcggcaaggcgcacgccaaattcctcacagtttctttcaagcgccgttacttggcgtttcgcaacttcatcctttatctcaaaacgattgacagtcgggatgttgtggtccattgtcgcaaatgtattttggggtcttctgacctttcttcccttttgtctcaaaccttcaaatgcctgaggagacgtcacctcatgaatgaggtgcaaatcaatatagagaagatccggctttccctcaccatgttttacaatatgctgatcccaaatcttttcgatgattgttcgaggcatcatcttttatttcctccctctacctagagctaagaccgcttaacgtaagctgtcacacattagaaattgtattttcactcatgattgctgccttaacttcctctgtaatggcctgagtgctgctgaactcttcaccccgtgccaaatcttttgttcttttcccagaagccaagactttgtttaccgcatcttctacagctttcgcttcctcttcaagcccgaaagatgttctcaaaagcattgccgctgacaatatggctgcgaacggatttgccatccctttaccggcaatatcaggcgcggagccatgaacaggttcaaacagatgaagaccagagcttgataggctggctgacgggagcattccgagcgagcctgtaagcatggacgcttcatcgcttaaaatatcaccgaacatattttcagtcaccacgacatcaaattgattcggtgcataaattagctgcatggccgcgttatccacaagcatgtgctcaagcttcacatcaggaaactcttgtgcaacgtcctcagccacttcacgccacagccggcttgattcaagaacattcgctttatctacagaggtcactttgccttttctggctgccgccattttgaagccctctctgatcactcgttcaatttccgttctcttataaaacagtgtatctactgcttcctgctcaccttcagtgtttacataacgtttgctcggctggccgaaatacaagccgcctgtgagctcacgaacgataacgaaatcaacattatctatatattcttttttcaaaggcgaagcgtcagaaaggctttcaaataccttcacaggccgcaaattcgcaaacaaatcaagctgttttctgatgctgagcagccctttttccggtctcagttccgaaggattttgatcccatttcggtccgccgacagcgccaagcaatatcgcgtctgcatttttacaagcagcaacggtttcctccgggagggggttatgatgttcatcaatagccgcccctccaatcaggccatattcaaattcaaattcatggttaaagcgttcggcaacacttttcagtacgtctgtcgctgattctaatacttcagggccgatcccgtctccgggcaatagagcaatacgtttcttcaagttaaccgttctcctttcttttatgatccgacagctgtgtggtttttcaatccgctcatattcgactggaaaaccaattgacggttgactgcgttcaaataggctttcgctgatgcttctaatacgtcttgcgctatgccccgacctgctgattcttttccgttcaccaaaactcttacatacacctgggcaaatgcatcttcgccttttctgttagactgaatgcggtagtctaagagctccacgtccttatcgatgcagcgctcaagcgtattgtagattgcttccacacttccagctccagttgcagcttcctgaataagctctgcgttttcttgatttttcaacgaaagagtagccgtagggacctgacttgttccgtaatgtacttgcagagaaagaaattcatacccaatcttgcgatctgttactttttcttctaaaataagagaaacaagatcctcatcagtgatttcttttttcttctcagtcaactctttgaacatcgtaaagaatttattaatctcttcactgtcaaattggaatcctaaagcagtcagccggtctttaaatgcgtggcgtccggaatgtttacctaggacaagcgcatctgcggttacgccgacaagctccggtgaaataatttcataagtcgatttttcctttaaaaagccgtcctgatggatgcctgattcatgagcaaatgcattatctccaacaaccgctttgttgcgcgggacagccatgcctgtcagtttgcttactaaatcacttgttctcttaatctcgttcagtgtaatacctgtttcgacttggtagaaatcttttctggtatgaagggctacagcaatttcctctaatgccgcgtttccggctctttcaccgatcccgttcacagcgcattcgatttgatcagcgccattttcaatcgcagcaagagagtttgcgactgccattcccaaatcatcatgacagtgggctgaaagctttgctttgtgaatgttcggaacgttttctttcatatatttaaagatatttccgtattccgccggggccaggtagccgacagtgtccggaagattgataacactggcgcctgcgtcaatcactttttcgacgatttctgctagaaacggcagttcagtgcggcaggcatcttcagctgaccattgcacaatcggaaaacgttcttttgcgtatttcaccatttcaaccgctctttcaatgacttgctcacgtgtcattttcagcttgtgcttcaaatgaatgtccgatgtggcgataaaaacatgaattctcgggtgagaaccttcttttaacgcttcccaagcagcatcaatatcaccttttacacaacgggccagaccagttactgaacaatttttaatggttcttgcgatttcctgaacagctaaaaagtcacctcgggacgaagcgggaaatcccgcttcaatgatatctgccccgagtctttcgagctgcttagctatggcaagtttctcctgtgtattcaagttcactccaggggactgttcaccatcacgaagcgtcgtatcgaaaaaattaattttgcgcaacggagaccaccgcttccttcttcttgccttgtttcacaaacggcatcatttcacgaagctttcttcccactacttcgatttgatgttcgttctcgcttgcattgatagcattgaaacgaggacggtttacttggttttcgacgatccactcttttgcgaatgtaccgttttggatatcttttaatacttctttcatagattcttttactttagcgtccacaacgcgaggacctgatacgaaatctccccactgtgctgtgtcagagattgaatatctcattcctgcaagtccttcttcgtacataaggtctacgattaatttcagctcatgaaggcactcgaagtatgcaagttcaggctgataacctgcttcagttaatgtttcaaatccggctttgacaagcgcgcttaatccgccgcaaagaactgcttgctcaccgaacaaatctgtttctgtttcttctttaaatgtcgtttctaatacgcccgctcttgcgccgccgattcctttagcataagcgagggctttgtctcttgcttctccagtcacatcttgatagattgcgaacaatgccggtacgccagctccttgctcatatgttcttcttaccaagtgtcccgggcctttaggggccactaagaatacatctacatccgccggaggaacaatttgatggaaatgcacgttaaatccatgagcaaatactaatgattttcctgctgtcaattcatctttgatttcagcttcgtatactttttgctgttgctcatccggaagcagaaccatgatgatttcggcttgggctgccgcttcttttactgaaaatactttatgtccgtcttcttgggcttgagtgaaagattttccttgtctaacaccgacgatcacgtctactccgctttctttaaggttcagggcatgtgcgtggccttgcgaaccgtacccgataaccgctactgtttttccagccaatacgttctctttgatatcaccgttataatatacttttaccattttaatctctcccttgttatgttttatacaatagatattgttttattggatgacgccttttgctgggttcccctcgcaaaagccgttgtacctgttctcgcgatttctttaatgccataaggttttaataactcaataagcgcttcaattttgttagattcacccgtcacctgaacaacgatgctgtctctgctgacatcaacgacagaggctctaaacggttctatgattccattaatctctgttctcgttgaaggtgcggagacaaccttgattaaggccagctccctctggacaatcgattgatttgtgatgtccgtgactttcagcacatcaatctgtttgttgagctgtttcgttaactgttcaacatcattttctccttcaacgtgaacgacgaaggtgattctggaaacgccggctgtttctgtgtgcccaactgtaatgctttcaatgttgtaatgcctttttgtgaatagaccggtgatccggtttaacaccccggagcggttcaccacagtcaatgtgataattcttttcaaggtttcacccccaccatttcatgcagccctttccccggagccaccatcgggaatactttttcttcgctggcaacccgcacatcaatgacaacaggttctcttgatgttaatgcctcttccagcttttcctttgcttccgcttctgatgaaattctgatgcctttaatgccgtatgcttcggacaatttgacgaagtcaggctgagaagcgaatttagattctgaataacgttcttcatagaaaatttcctgccactgtctgaccattccgagacaagcgttatttaaaatcactaccttgaccggaagatttaattcgcgaataacatcgagttcttggagcgtcatttggaatccgccgtctccgacaaccgcgacaacagtagcatctttttcggccagctgtgcgccgatcgccgccggaagaccgaatcccatcgttccaagtccgcctgacgtgacccatttatctgctttttggaacggataaaattgcgctgaccacatttgatgctggcctacatctgttgcgacaatggcctctccttttgtaaattgatgaatatattcaatcaatttctgaggtttaaaaccttcttcttcattatctacataccagagcggatactcttctttccattcagcgagctgttttttccattcgcttgaatcgctttgtttgccgtcttgtttgatcagctcctgcaggacaattttgctgtctccgactacaggaatctgtgttttcatgatttttccgatttcagctggatcaatatcgatgtgggctatctttgcgtttctggcaaagtgtttcaggtttcctgtgacacggtcatcaaaacgggcgccgatactgattaatagatcacattcatgaagggccatattggctgtataagtaccgtgcattcccgccatccctagaaaaagcggatggtcagccgggaagcctccgagccccaaaagggtgtgtgccacagggatttgctgctgttcggcataattttttaattcttctgacgcttttccgtgcagtacgcccgcacccgccaggatcaccggttttttcgcactgctcacggcttccacaagcttgcggatctgcaaataattcggctctgttgtcggctggtatcccgggagattcatctcatgatcgtagctgaattctccttcaattgttgctacatctttcggaatatcaatcaatacaggtccgggtcttccagttgttgcaatatggaacgcttctttaatgatgcgcggcagatcttccggctggcgaacctggtagctgtgttttgttactggcatcgtaatccctaaaatgtctgcttcctgaaatgcatcgctcccgattacagaggttgctacctgccctgtaaagacgactaacggcaatgaatcaatcatggcatcagcaaggcctgtaacaaggtttgtcgctcccggccctgacgtggcaatgacgacacccggttttccggagacccttgcgtatccctccgctgcatgaattgctccttgttcgtgacggggaaggatatgtaccaaccctgaattgtatagcttatcgtaaatcggaagcacagccccgcccggataaccgaagatcatttctactttctctttttttaatgattcaatcagcattaatgctccgctcatcgtctgtgtacattcggcagatgctgaatccacctgtacattagtccccattttagttcctccttttggattttcatcctttaaagatcatcttttcattagctatatagctgattattcaataaaaaaagcccttccgcccacaatcagccgcgcagtaactgcgatagctaaaaggggcgaaaaggcttttctttccgcggtaccacccttgtttacggcctgttaatcggccgtctcatggatatttctatccgctttagtaacgagtgaatcaagttcacccggccaagtcctactgtcatttcagactggcactctgaggcgagttcaccttgtaaagcttcgccggttctcagctaacccggttctctgtggaaagctttttcaaggctacttatcctcatctgcgcttttcatattcagccttcggaacggttttccagctgttcaagaaggtcgtttgtttttcactttttagaatcatactgcgatgattttcgcttgtgaagcttgcgtttatcttttgttgaactcatattacgccgctttggacgcagtgtcaacagcattttttaaaattattagacaattttgattaatcaatctatattgtatacgctttcattattggtacaaaaggaattgcaaatgttaaaagtttttataatttttttattaatctatcaagaataaaccagaattatttaattttatataaacatgtaagattttataacacgctatggttcgtatatggattgagtctgacagatcatcttgcaatccatttcaatttcggataggcacccctattattcctcggcatacattaatggtatcttgcaaagaaaaggtgatacgatgaataaatcatttgcagacatgcaaggatttcctgcgggctttccaagcttccccaactttccgcagcagtattatcctgctacccctgccttctaccagcaaagccagcagccatttggaggctacggatacggacagccgttcagtcaggcatacagcccgttaaccactccctctggaatgtactcctcattcccatacgcttcagggttttacggacagcaattttcaggtgcaggctttagcggccatggcggcagcttaagtgctccagcgatacatgccggcggattcagcggggcgccaggcgtacacggaggctttagatattaaagaagaccacaagggccgaacatctattgcggtccttttattgttttaaaacgacttcacaaatacagtcacattttctgtctttatatttggaaacaggatggaatatgattagatgaattgaacgatattctgcacaatccgtaagttttcgaggaggaataaaattgcatataaaaatagacgatttaactggacgtcaggtggtttcactggtgaatgagcatttacatagcatgacgcttatgtccccgccagaaagcattcatgccttaggtttagaaaaactaagagggcctgaaataacattttggagcgcatgggaaggtgatgaactagctggctgcggagcgctaaaagaactggacacccggcatggagaaatcaaatcaatgcgaacatctgcatcacatttaagaaaaggcgttgccaaacaagttctccagcacatcattgaagaagccgagaagcgaggctatgagcggttaagcttagaaacgggttcaatggcttcatttgagccggcaagaaaattgtatgaaagcttcgtttttcagtactgtgaaccgtttgcagactacagtgaagatccaaacagtgtgtttatgactaaggaaatgtgagacgattttataaggatagataagtgcaggggaaggtctgtcttatctatctttttttatattcacacatttttcacctttatgatacacgccaatgttttcaattttgtttaattcaaagaacagcgggaattacaaacgacatgaacgatatcatgcaaattcataaaggaggagattgatatgaaaagcatagttggtgtatatgaaactccgcaggaaaccatcgcagcgattgaaggcttactcacaaaaggctatgattctgatgacatttctgttgtgacaagccggcgagatacagattatttggagtcacgtacaggaacagaagtcaatcaagccatcgatgcacatcaggacgaatctgaatcttttttcgataaactgaaagattatttcacaatggatgatacttctacacacagcaaagcattatccgacttggatattaaaactgatgaaatagacaagtatcaagaagatttggatgacggaaaacttctggtagccgtcgatacagatgcaaatgtaaatgctcctattgataacggcaatgccctttcaggcggcttttcaagcacaaatgaattggattatacaacgaaagaagaaaaaacgatgccgctccgggaagaacagctgaaggtcgataaggaagacgttcaaaccggcgaagtagaaataggaaaagaagtgaaaacagaaaaaagagatatggacattccggtgagacatgatgaaatttatgtcgaacgccgtccagtggatgaaaataaaacggacgctgctcccgtcaacgattcggaagagatcagagttccaatcgttgaggaaaagctggaagtgactaaaaaaccggttgtcactgatgaagtggttgtcggcaaacgcactgttgaagaaaatgaacatatttctgaaactgtgaaaaaagaagaacctcgtctgaataaagaaggaaaagttgacggcttggatgatgatccgttaaataacaaatgaaaatcataagacgacaacaaaaacctcaaatccatttaggatttgaggtttttcttttggtacgtcccaggagagattcgaactcccgaccgacggcttagaaggccgttgctctatccagctgagctactgggacacgttttgtttttcgctttaactatcagcgacaagatttattatatatgggatgcaataataagtcaacggttttttagaatttttttcatgaggaagaaaattttcttcctcatgacattttcatagtgtgactcggttttgcagatcctcaatttcattgcctgcttggtcgtaaaaacggactgtcgcagcatcattttctaatgtcagtatagcatagctttctgtcctgcgcaccctcggaagccggatgctacctgggttaatcatcagttttccgcgcagcacttcgcttcccgcgatgtgcgaatgcccgaagcagataacatccgctccgagctcctctgcacgatagtatacgtttaacaaggtctgttttataccgtgaaggtggccgtgtgtgaccagtatttttcttgagccggcattcagaagaagctcgtccttaaaatcgccggcaaaatcgcaattgccttttacaaccgcataaggctccaatgcaggatgcctcgtttcaagctcagagtccccgcaatgaatcatgagatcaacttctgcctcatgccgtttcgcaatggtttggagttcttcttcaagcccatggctgtcactgataatcagcacgttcatgtacaagcttcctccttatgcctccaaaagcttagacagctttttaagcgcgtcagccctatggctgattttatttttttcatcacttgtcagttcagccattgtcttatctttatctttcacgataaagattgggtcatagccaaagccatattctcctctcggttcttcggcaatatacccttcaacatggccttcgactgtttttgtttcctctccgggaatactcacggccagtgcgcagcggaaacgggcggtgcgctgttctttttcgatacctttcagctcgctgagcactttttcgatatttgcctggtcgtctttctgttcccctgcatagcgggctgaataaaccccgggtctgccgccaagattatcgatggatagaccggagtcgtccgcaatcaccattttgttcactgctttggcaacagcttccgctttcagaatggcattttcttcaaatgtatggcctgtttcttcaatttcttctgtgaatccaatttcagctaaagatttgacatcatagcctcttggctcaagaatttctttgaattccttcacttttcccggattatgtgtcgcaataattgcttctttcatgatgatcaagcctttctgtctttatttcagttctggcagagaatcacccagcacttctttttgcttgtcaatcagctcttgaattcctttttccgcaagacccagaagaccgttcagatcctctcttgaaaaagtcgcctcttccccggttccctgcagttccacaaaacggccgctgcctgtcatgatgacattcatgtcaacttcagccgaggaatcttcttcataatttaaatctaacaaaattccctgttccttatcaattccaacagagattgcagcaagaaaatcagtgatcggatttgtcttgattgttcctgctttgatcagcttgccaatcgcaatcgccatagcaagaaatgcgcctgtaatggaagctgttctagttcctccatcagcttgaataacatcacagtcaatccaaatcgtccgttcaccgagcttttccagatctacaacagctcgaagcgcgcggccgatcaggcgttggatctccattgttctgccggaaattttccccttagaagattctctgattgttctttggtttgttgcccgcggcagcatgctgtactctgctgtaatccagcctttccctccgccccgcaaaaacggcggtacgcggtcctcaacagacgcgttgcagattacctttgtattccctgctgttattagaacagaaccttccggatggctgataaaatccaaatcgaatgtgattggacgcagctcatcgtgttgtcttccgtcatgtctcatgttttacctccgattgtatgtacataaaccatttttgtcccggaattgaataaagaaagaggcagccggaacgctaacctctttctttctagtatatcaaaaatcccaatttaaaaactacccgtattcacttgagatggtctggagaccggttctgtgagcttttcgcctttttcatttacaagctctgattttccgttcactttaacagagacgctttttacatccggctgctccgttaacgtcagcacaatgctgttcagcacttctgaagaaatcattttcgtcttctcatcggcgctgccgaatatagattgattgaaatccaacgtcacgcgcccgtctttgattttcggtttgctgaccagctttacatcttcactgaagtctgttaacagcccgctcaccttgcttggccctttagccaattcattgatggctgccgtgatgtcgtctttttccgaattgtcgattcgtttggtcaccggcacgtagtattcactgtcttcgttttccgccaagtagtagactgtcagcggatgggtagcagtgagatcatttacaccggctgtttccaaattaatgccgtctttgcggcttaaatcatctgagatcggcgtccctcctacaggcatctccttcagttcatgcccgtttattctcagcttcactttatctatcgaactaaattgcgtcagtgtccacgtcacagattgaacgattttctgttcgtcttctttcttataatttttgaactcattagagaaatcagctatcgcggttccatcttttttgatgtcaacgttaacggtggtgtcagccggcaatacagctctgaagccattcggaagaatttcagacacaggcccgccctgtacgaggtattcaagcgcctgcttagccgtgctctcacttttagggagaggcagcgtttgcgcaacaacatatccgtttttatcaatgagataaagctccctcataacagtagatgaggcttgatccgcttttgcggtatcgcttttttcactttctgtttttttggctgctgttgtatttgaattggcacccgcttcatcgttcacgaatgtaacgtcttgaggcggatcaatttcctcggctgccttatcagattgaaacaaaccgcatccggataaaagcaaggcagaggtgagacaagtggcaccaatgactgcaggtccttttttcagcatacttttccctcctaaggatgtttgtactattatgtatacgagcctctttaggaaatagaccgaagaattccggcaaaacagaaaaaaacccgcaacataccgttgcggggaaaactatcttttaatcggttcttgcagtgagatacattccacatgcccgacttcatggccaaaccaatcgtctgcgatttttgcaaactgatcacgcgcccctgttgtcaggaactgatgatccggggcaatcggagactggttcagcagccctttataagagagaattgtgctgacttcccgggctgtttcatcgccggacgaaataatgtttacgtgctctcccatatatctttgaatggcttcttttaaaatagggtaatgggtgcagcctaaaatcagcgaatcaattgatgtgtcttttaacggatacagcgaggttttaacaatctcgtctgctgttttgtcgagaaacttcccgctttccacaaaaggcacaagcagcgggcaggcaaggttttcaaccttcaaatcagggtttaatgccaaaagcgcttcttcgtatgcattgctcttaatcgtattctctgtgccgatgacaccgatatgctgattatccgtcacttttatcgctgctctcgcaccaggctggatgactccgaccaccggtataccgacgctgcgctggatgtcatccaatgcgatcgctgttgctgtattacaggcgatcacgagcattttgatgtggtggttttcgagtaaataattcgtcagctcccacgtatattgaagcacctcttcttcagggcgcggcccataaggacaccgtttcgtatccccgacgtagataatattttctttaggtagctgtctcatgatttccttcgcaacggttaaaccgccaaccccggaatcaatgactcctattggttgttccaacaaaatcgcctcattttctcttcatttcatgctgcagtttcatcaaagatttttcgaagatggctatttcttcatctgtaaacgattcgaacatatcacgcagatattcctgtctttttgtaatgacctcttggataatccgttctccttcaggcagcagatgtatcctgacaacacgtctgtccgccgggtccttgacccgctcaacaagctcatttttttgcatgcggtcgattaagtccgttgtcgtgctgcatgccagatacattttgcccgataattcaccgattgtcatatctcctaattcataaagccattgcaagccgacaaattgcggcggcgtaatcgcatattggttaaggatttctcgtcctttttgcttaatgatcgcggcaatgtggcggagtgacttttcaatatccgcaacatgctccaaaggttttgatgtcatttgtccatccctcactcaaggatctcttacgcacaaaagcgttccgtgtctattttccttcttttttgaagaaaatgcaagactcgcaggagagaaatagaggactttagtcaaacaacatcaagaaataaaatttaatttatgacttgcctacgttttgcacagcattccaaatatggtttcgaatgttccaaacaaacagcaataaccggctccttccaaaagaaggaataccggcaaggattaaagctctagctcacccattctaagaagctcaacaacggcttgcgaacgccctttcacacccaatttctgcatggcatttgatatgcatatctatcgcaaactaaaacaataataatcacttgaatttataatggaaatcgactgttccatcctcgtatattacaagtttatcaataagcgctgaaaatgcttcgaataaatcctgatcagttctttccagctgtgcgaatgcattcttaatatttgatatgtcgattgtttcttcttcctcacgctcaagcatgaacagcttatcgttcagtttttcaatttgttcttcaagctcttttcgcttcgcctggaattccgccttagtgatcaactgatcttccaagtacaattcgattagacgttttttcttgttttctgcgttttcaatttctattttcgttcgcttgatccggtttttcttctgctcttcaaaatcagattttacatccagttttaacttcttgcccttttgtttcagtgttttaataacaaaagcccgcaagtccttatattgcatcggagcatggtttacacaaagagcagttccacctcgtctgtaggcgctacacttcaaataattaaactctttcttctcacgtttctgattgtatttgtacgacggtagcacaaccatattgcaaccgcacacaccacatttcatcattcctcgtagctcattccgagggttaaaacgctttttacgcatcttgtgttctttgttattagctttctcatactcttcttctgatatgatcttaggacaccagtctttgtaaacagtccatttttcttttgggttgcggataaattttttccgtccccctattttgacttgagtatgtctattggcaataaacacgccacaataaataggattctttaaaatcgtttgtactgtagacagctgccaaaactcagtcttttgaggctttacaatgtttccgagtgccaattcttcgttgagcttgagaacgattcttttatgtccatacccatgattattatgaagatcgaaaataaaacgaacgacttttgcttcttcttcattgatagctaggaatttaccttctttcttaaatccaaaaggtacacggccggaatgttcaccacggcgagcttttgctgctagtgccccgctggctgccactgaaattgtttgaggatattgggcagcaaacattgaaaacatttcaaatttcattgagtttttgccttcatatagactatcgtacccctcttcgagcgtcacaactcttacaccgtgggccaataaaacctctcgaatttcaagggcatctttaagatcacgagcaagccggctgattgatttaaaaacaaccatcttcagctttcttttttgcgccttatctaaaatgagttgcatcgcttttcgatcaagcagcactgtcccgcttatcccatcatctaattggattgcttcatctttccattcgtaattatttttctcaatccaatgatgacaaatatcaatttggttggctattgatgtcacctgttcatctttttctgaggaaacccgtgcgtaaactgcataagggtaatcttcatatttgatgatctcctgtgtttctgtctctttgaagaacactaaaccaccccattattttgcatttggtacattttagtgtgattatagcataatgattacgaacctcctatacttttccggttgattttcgaacatttgttcttgtataatttgttcaaggagttgatcagaatgaacgagggtatttatgataaaagatgggaacaaaaatttattttgcctgagcaaaggacagcgctattaaataggaagaaacaagtccaaaaaattgaaaaacccatcttagatgaataccaattggaagatatggcccgtgttatttgcgaggcgatggaattcaactcggttctggtcatcggtgtatacagagacggttttatcgaagaagtaaaaggacatgtccattacatagatgaagtaaaacagaggctgcacgtgaaggatttaaaaggtgatacaaattttattgcatttggttcagttctttcagtagagcaaaaataaaaagaaccagccacataataagctggtccttatctttaattaaagaaatggttatgtaaagctttagaaaatccaaaaccttcttctggtccctttaaccagagagaaataaacttttcgaaatctacttctttttcaatatctttcaaaattcttttaaattcttcagtaaagttatgaagagagacctcttcgccatttttaagtttatcagtgtactggctcgttaactctcttaatccttgatactgtttttcacttaaatcataagccaaaacttgatcaaataagccaaaccgatcataatcagctgctaattgttggactaaccttagttgaaaagcctgtttctcgacttttttttctaggttgtcaagcctttcttctactgttaccaattcaaatcacctcaattaaaaagctaagaaagtaaatacacttgcaatagttctagctgtagaagattttacaccagcatcaattagatatgaggaaacagtgtcaataattgcgtcctccacaacgtcacctcgtttaactaactcgtccaaagcatctgctacatcatcagtatgttttgcgaaggtttttcctgctgatccacctaactcatcgactacctcaccaacaattctcccaccatgtcgaagcgcactggctgttgccttcattgcttctttagcaatccattttttaataccatttgtgtgaaattcaccagattgttcagttgtattagttgataattcggatagtttagcaggagtttgataagtgacttcttgctgtgcctgtaatgttacctcttgagctttggcatgtccatccaacggaagaactaatgataaagagaaagttaatgcggatgttgctaaaagtaatttcttaaacatgaaatcaatccctttcttttaaattatttacatgtaaatgatagcattatatttcgactagaaaaataatgctttttactcaaatattagaataattttgaactatctgtaacaaaataaacaaaagtatctcctcgagaaagatactcaaggagactatttatttacttcaagagcgcttctagtttcgctttcgtatctggtccatatataccgtcttgaggaagcccgtacattgactggaaccttctaacggcatcagctgttttcggtccataataactatctatcccgaagtttttagcttttttatccggatagaaatgcaatgccgccagcgctgtttgaatctgttcaacagcatcactgtgcatcaatgggctcttcactttgaaaatgccagaaggcagattgaaagatgatttctttttgcttgagcttggttttttcactgccttggacgaagttgttttcttgctggatgatttgccgccaagtgcttttaattcagcatcaatagccgctttaacctcattccagcgtccctcgtctaaaatacggtgagggcaatactttccgctccaatcttggtgcttccgcactcgatcaataccccatccgcgttctttaagcagctgagcaacaaacttgatagccaacttttcagcagccctgtatttaggccctcctgacttgctgtagcagatttcaacgccaatagacttacggttcccggtaccgtttgttccgtctcctgtatgccatgcattgcgatctgttgggatgccctgccttacctctttatcatcaacagcaaagtgaaagctcgttgaacttgtgtttccgatcatatagctgacctcgttagcagcagatgcatcattgtaagtgttatgaatggtgatgtattccgcggtcatcggattagggcattttaaagcgtattttgcttctgatacaaggttctttttcactgcgattgtcataaatgatctctcctattctgcttttgaattagaaagagccgccagctggcagctcacttggttagattgtgatttttcaggacagctttttgctgatggccttttgcagtcacatagttgtttttgaaccatgctgtaaatgtcgtgccaatagtaaaggctatagagcccgcagtgtacagcgcatccgcaagctgattcacctgatcctccgtaatatccaaaggtgatttgccaagcatcagcattgtttggttgataagtgcaatcaaaagaagcaccgtccgaatgaccgtgcctttgtcaaagtttttcatattgtgttttcctccttatttttgcaaaacagtataaaaaatagcgattgcgccgccaataacgccagtgcatatcgctgtaatgatagcgccagttattgtgcgtttgatccaagttgtattctcttcgatcttgttgagtttttcgtttaatgtcatgatttgctggtcttgtctatcagaaacgcgttcaagaacatttacacgctgttcaatcgttttctggcctgccttcatttccattatctctttttgtaatgcatgcacatctggtacctccgtcacttctgacattagtacgccccccttatatctatttcacgtttttcacctccttagaggcaaaataaaaaagccttattgactggctcctgtcgtttcctcgtatggttgacctgttacttcttggtattggtcatgtgtaatgtattgtgcctgaacaccttctttcaagtcatcaacggaacaatcgttaaatgccatagcctgctttaccatggctgttgtggcccatttgtagaacaacgcaaatacccagaaattaagattcacttgtcattcctccctttaaatagagaacatctaattttaaagatgcaacttgctcacctaaagattgattcaaattttctgcttcttttcttgctagcacttccgcagtcaattgtacgcctaaagcattttgagccagctcagcctgttttcttgccagtttttcgtctgccagctgttgcccaagtgtagccagctgttctgctataggattggtttcaggaatactgccttgtttcagctgctctttgtattcttcatcagcagtttcaacccatgtttgtttttcctcatcgaataaaggccgccacataccctctccatttatttctggaggaatatcagtagcattcgccgggataatatatcttcctgactctctatcggggtgtaactcaaccggccttcctaaatagatcttatcctcaccatatgggtatattaatttcatacttctccctcctttctttaagttagaggcacatctaagtcaatataatatccattcactttagactcagtattagccattacccctgttagtttcatatcaccagatgcatatataataatcttgctgtaaccagtggttccgctagttgcaaccagtttgactatccctttgcttggagcgctagaagacgggatactagcaaatacaatctctctatcagtaagaacatgaccattaagatgcaatgtatttccgactttacggtattgtaaaggtctatcacctgtagttgccccgtttttgtatggaacatttagccacggcgtctctataaagtctaggtctgtaataacctctcgccacccagtgaattctccctctttatgctttgttccaatccatgtacggttatcataggatcttgttgcgacaattttctttaacccttgaggtggagcaaggtcagccggaacatctgtaatatcataatagtaccaggcagcatcatcatcccccggatgattcagaacacctgccccaaaataaaagccagtcggataatcaaaaaggttttgtcctttagttatctttattctctgaccgttttgggttgtcaggggatagagttgtccattattccatttgttcttatcttctttcgttacatgaatgtctgttttattttcatgagtattgacctttgtttgggctcctgctgagtattcgatttccatccaaggcgtccagttatctgatccactcaccttatttcttatgaatttccgccgattatcaggtatagaggttgttgcactggtataagctgtgaattcctgatatggataagtgccgtagttgtaaaccaataaataaccattgctattcacaggggcattcagtgccgttgaagctgaagtcatataataaaaccctgtttcaataacagtattgaaatccacgcctgacaagtttttcatcaaaccattgtcttgtgttaattttgataactgagccgcattccacttggttcgctctgcatcagaaatatgacgaatctggttatagttatgtgcgtcaaactccgttttggttgcctgtttgtcattggtaacattaccgagcccgacttgatcttttgtcaccccatgagggttgcttttatcattaatgtgttgttcagtatacgtttttgcatttttttcggctgtatcagctttgttttgcgcccctgtagtcgtttccttcgcattccaatttgaacgctctgtggctgtgatatggcgtgtggaatctgtattgtgtgcgttgaattctgttttagttgcttgctgcacgttgtctacgtttcctaaacctacttgggcctttgtgacttggttggggttatccctacgcgcagcaaattcatctgtataagcttttgctgtttttaaagcagaggaaacgtcatcctgcgttgccccgatctcttgcaattcctttagtgcatgataggccgtatactgataccagttgaaccaatccgcagggggatgatccattggtttgtatccttcatcaatggaggactgcgggggccgctgcccggcgttcccccattcaggcaattcttttgtaaaaggcataaacatcactccttaaatcggtaaagggtaatcatcttcaggctgaaagattccgccaagtgttcccccatctgtcccgtctgttgaaaatccatattgacttgtttctatagagttagcagaggacgaaaaacgaaaggtgccgtttaaatctacataagccacccgtacgcctgcagcaactgttttttgaacgatattcgaaaactgtgttgcactcattccaactttgctcaaagcctcaatgggtgccttttttacgataatggcagccggttcatcttcattattttccttgctgctgaaaatgtgtatttcacttggcttgcagttcagtgttttggctaaagcttcaatgatccggtttgtggtgccatctgaaacatttctggcaaccttgccgcgaataagcacacgataaatttcatcagtggcacggcccctatcctgcgacacgttgtcaccaagtagatccagagcctttccttttgccgcatcaatatcccgccagttctcagctgtggttagcgcgcttttaagtgctgtcagctgttcatcgacaattaaaaaaagctttccgatattgctcttttcatctttcaaaaaggcatcggtcagctttcctattaagtctttaatcatatgtgattcaccacgatttcatcaaaatgtacctgggcaacctctttaggttcaatttcaatgtttgactgtgaaaggtttgtcgcatctttccccatcctgattgttacatcagagacaccatctacttgatataccgcgttgaacaactgcgacaatataacatcatcgcccatttgtgagccggtatagtaagagccgtttgcatcaattcccccgattttataaacgaggttgtttttgatctgacttactccatcaatagggaaggaagcatttgtttttaaatccagctgcagatatattttgacttcccttgcaaaatcaaatttgacggcatggtcaagtccgctggcgtcagttatggtgacaacttgctccccgaccgtttcaattcctgcagcaacactgtcaaacagtgcttgcgcaacatcatcttttgtaccgcccagaacataagcatgaatgctttttggtgggttgccgtccgcatcggtctgcatggtattgttggcaacaatattcgccgatctgacgcctgacacgcttagcagggctgaaataatacctccgtttgtagatgctgaactgccctcaactgatttctttattcgtgcccggaattccgaatctgtttcctcgtcggcaccgcctgccgatggttccggatttgtaactgaatacacgccctctgagggctctgcctgcacggtaatggtatttgccgcaacattgtttataacgcccttagaaagcgagacagccgtccctgagcctgtcccattagcctcaattacaacatcttcaatcaattcaaaatagatgcctgattccgtagtaaactgagtttgttcttcaattacgatgccgggttctccagtaaaggacagagtcacaactgactccgcagctggctcccgcgtgatacccgagttgctgccaagacgatcgagctgcacgccctcagacttactgacaaagccgctgttataaaccctttctgcaatgtcccacaagccggcaagaaaccaagcaaagatacgaataataattcctaatggtgttttactggatgtgtttacatcctccccgaattgctcccgcgcccggtcctccatactatcaacaagctcggaataggtttgccgttgaaagcctgtttcatcaagcaagatcaacaccccctatctcaattgtttcttcatcctcttttgtcattttcacatgcaccgcaagactgcgagactctttatccattaaaaagttcaccgattccacactggcaatacgctcttcttgagaaatggcatttataatgtcatattgcgcctcttcttgatcaaactgctttcttaaaatgttgctgcgatcaaggccgacatgttcatcaagctcaaactctcctaaacttgttctaaggatcatttctactgattgagccagctcagcatcaccctcaaccatttgtaactcaccattttcaaaacaaagatccccgtctttaagcttgagagttttcatccttcccacactcctatgacaactggatcgtttatactgtgtgtgcgcctcgaatccggatcaaaggttttattgccgtccaggttatccagtgaacgttcagcaaacgaaacaaacacgcaggaccctactttaatatcagcttcgacgtgtttcaaaacaggcgcatgctcgattaaagggtattcatgtagatactcaccatcattggtttgaaacagcaatttcagatcggcagtgtgtttctcagcattgtaatttacaacccgtgctggcgccgttgtatggattgattgttttatccgctgttcgaatccgtcaaagaactttgtcgctttactcattaaatcaccctacattctgtgaaaaagtctttaccgtcaaaggaatgagagccatctttcacacgatattttcctttcgctgtcttgctgtttatttctatgattgaagcaactgcgatacgatgctgcaataggcacttcaccttataccctttgagatcatcttcctcaaattgttcaggcgtttccacaagtcctgttgcctcttcgagcttgaaacgttcgtcatccccttgactgagtggccgaataacaggacggccgcgccgataatacatgactgccccagcatcatgaatgacctcttcaagattgttttcaatcaatccggtgacacgatagccttttttataaactttatttttaggcagaatgatatttttcacttttataccgagcacacgcagaagcttatcgacaatttgccttgaggttgtgccagccttgaacgtgattttcatgtatctcttacggtatctgacctctgtccgagtgccataatttcggaccgttttatatgtccggccgttcttatctttttttacagtcaccactggttttgcgagcttgtaccgctttttcacatagtatttttcagcaggatcagcgttttcagtggttactttcatatgggtgtaatcatcgccatcttttgaatagatggccgttaccttattcaaaccgtcccaattattcagcaccttggtaactttaccgatagttaaaacaccgtaatcgtctttataaccagcttgaacagtgatagtgctgccttttttaattttgctgattgaatctttgctcaggttgtatatttcaacctttgtttcattcggtttaaagtcatcatcaaacgggacctcaaaatgaatctctaagtctttataatcgaaagtggtttgtgaactgccgttatctatcgtgaccttaacgacgcgcccaaacagcattttattcgtcgccatcgtcttctccctccgcatcgtccgagacatcatcaatataaagaaacacggtttgcataaaattctcgtatgtaacccgtgtttctgtattcgattcatccatagggataagggaaggcgcaggcagtttctcgtttacaatgtcttcccacaaagggacgttcaaaatcaatttttcgcccagcacgattgattccatgtcttgatcatataaatcaagtgaaaaactatcgtctgtttggttgtaattgatacgcaaaatgaacgtgtcatctgctaaatcaaattcaaactgctgtggtatgtcctctttgtcaaaaggaatgtaatctcttgatgccatgcctttccctccttcatctaatcctcattttgacccctatcggaattcttcggtccggccagggattcaaccgacgcaaagcatttactgtggtgccgtatttacgagcgcagccccaataagtgtcacccttcttgaccttgtggtataacttgccggatttttttgttttcttcttgctggctttcttctttttcccggctgttttcactttctttttgacccacgggctttttgcaatacggatttcttgcaactcaattgaaatagcaaaaccgtttgtgtaatcgcctgtgtcgcgatctatctttgtgatgatcacatttttagcaaccttacgcccggtataagtcaaaagagtgccggcataagcctgctttttcagatattcataatcactatttgctgttttgcctaataaatagccagagactgttgtcgtctctggctttctttgtacatggtccgtgatcggaacccctttttcaacgggatatgaagtgacctccacatccgcgccatcagattccttttcgtttacgagattaatctttccgagcttcgccaattaataagccccctctggtggataaagcgacttcagcatgtcgaaaacttcgtcaaatgtttcagttacagcctttttcacctttgtttctgccccttcactgccgccctcaacttttacgttgatcgacgggttaaaagtgatattgacagatgaactgtttgagcttgtagcagccttttctggtgtgtaaccagtatccgcgccaagctcccgaccgagtgcagcatacattccgagtgattggtttctgtatcgtggctcagttgtgatgacatactccctaaagccgttttcaccaagcgcagcgacttgtgggctgttaatgactccacctgtcgcataacctctatacggcccaccatgagccatagaaacgagcccagggtgttttaaaataccgccgtatctgctgttcaaatagttgatagcagcaaggatctggtcaactggatttttgatatttccgtgacccggttccttgtgagcgttgaatgtacttggtataaactgcataagcccttgtgatggatggccagctttcgcattcgaatcccaattgttcacgacattaggattcccgcctgattccttcatggcaatagtttcaagtgcgccagcatattcagagccaagccccttgattgatagcgcttgagctacccactttttgacggcttttgaaccgccacctgaaaagctttcagcgtaactggacattttgcctttaacaaaaccaacggccttatctttgacaaagttaaaagccccttttgcgatatcaccgaacgagccagccatagaaggtgcagagacacccattttttctaagacttttgttaaaagcttagatgggtgtccgatgtaatcaaaaacatcaagagcaacatctttcactttacctgcaacggattttacaccattccatgcttttgtgaagatatttccttctgtacctttcgcgtaagctggaactcctgataaagcagcccttgtctgtttagcagataacacctgagtgccttttgggaggttcattagtgtatcacttgcagggctgagtcccacatgacctgatggagtacgatacatttcaggaccagcgtttgcccctttaccgtctcccagtatagccgggcctcccgggtgtccgccggttccgtgtgcatacttaggtacaggccattcaggtatatgtttatctttcaaaccgatcttatcaagtacccagttcactccgccgattacaccatttactccttttccgagtgctccggcaagtttgttcgctaagctagtcacaccagacacagctttatgagccatgttcttaattccatcaccgattttacccggaagtttcttggccccttcgactaaatcattgaaacgatccataactttttgacgtaaatcaagcgccaataacgcgactttattttttatataaagccatctatcagtgattgctgaacccatattacttacaagctttttcaccatgccgacagcactagaaaaaatttgcttcactccgtcccacatcatgcggaaattcccagtgaataagcctttgaaaaccttcactattcccataataatgccgattgcaccctgtattatcgcaatgatatttttaagtgcaacttgaattattgagagcacaaccgggaacacagcagtcacgatatttaggatgaaacggatcgccggaatgaccacagttgtaatgatattcgccagaaattgcaaaagagaaacaacaatcggaagtaccgcttgtatgatttgcatgatctgcgggaatacctgctgcacaacttgaatcaaaataggaagtgctgcttgcgccaactgtaaaatgattgttgccgctacagtaagcaattgagccacgattggaagaacagccatgatgacttgtttaataatcgggaacacttgctgcaccgctgataaaattaacggcagcacttgaaccgctatttgtccgatggatgaacctaaaagctgaatcaattgcaaaacaatcggaagagcttgttgtacaatgctcaggatcaacgggaacgcaagctgaatcatttgaaccaaaatcggtaaggcattttgcacaattgaaacaaggattcctgagaaactgcctatcaattgaataatgattggcagcactgcattaattacgctcagaatgactggaaaaatcgtctggaagccttgaacaagtaacggtaggatgctgcttgctatttgcaagacactcgtccataaagtacccgacaactgcatccaagctgaaagcaattgctgaatcagtggcatgatttgcggaccgattgtctggaacgtttgcgagatagctgcagcaaacaaaacaagcgtgccgcctatttgaacgaaagcctgctgaagttgtccggccagctgctgaaactgtggcgtcaattgcgtaaccaattgcccgaaagactgttgaagcgtgttgatgattggctgcaatgcctgaaaaacagtcgttagaacagattgtaccgatgtccatgccgtctttaaggcctggcttacattttggtttgtttgttgcatgcgatacaaggcgccagcaacactcaaaatagcaccgacagccacaccgattggccctgacactccgaggaatgcaagtccgatcgccgcgacaaacggagcaacaagagaaaccatacctttaaagctggatagaccgactttcaactgctccatgaatcctttcacgatgccgtttagaccgtctgatagtcctttaccgaagaagtccgagactgtctttccggcattatgaatgaagcctgacacggttttcacagccgttttataggccgactcaattccagccactaactgtggatgcgattcaccgagacgatcccataatttcaaggattcagcctgcattttatgaatggctgtgatcgccacgttttgtgcgtccttgaatcctttcatgaatgcaggttttaaaccctcagcttctttgatcatggtatggaatgcaccgacaaccgccgatttccccatgtcagcaaagcgtttcatcgcgtctgtagctggcttgaatctttcctgaagcttatcgaaattcttgtacagcaaataaatgccggttacaaggagaacgattgcccccgcaacgacatacaccgtgcccgacatagcagccagcccggttacaactggaccaatgaacatccacaaactgctgagagctccaaggaacccattaactaaccctacccctatcgctagtggcgataaaagtagggttaaaacagggatgagaagcataaatccttggatcattttcgagagtacagggtgcgcctcattaaactgaataatcagcttcgcaacggccgtaatgcccttgtatatcgccatcgcaaacgccgcaaacacttcgattgctggctgaatggctttcagtagtgtgctgcacatctcttcccatgcctttgaatagccgggaactgtttgtgttgctgctttatgaagcccttggaacatgaaaaagtttgtaaaagccgcgcccagtgccaccatttgaaaacgcatataaccctgagtgatcatcattgtcatatcgttaagctctttcatgttggcagtaggtccgagcattttcagagccaaatgcgcagcagttccctgctttgccatgttctcaagcgtattcgatacggcaagcccagctttattgacttgatataatgggtttcccattcggtcatagttcgccgcaatcttctcagattgagtggaccgagccatcaatgtccctacagtctgcagcatgctcatgcgcatcattttgttgtttttcatcatgttgtctgttacttgcttgtgagcacgtcccagcctgtacacttcatccataaactgctgattggtgccagaccagctgtccatctggttccctaactgaaagaaaccatactgggctcggatcaattcattccgaaaaccgttcatgccatatcgttcttcatgccaggcttgacgcatttcattgagcattcgtattgtatcggcttctagtccacgggttgagccgcgcaaaaagtccatttcacggttatactgccggattccccggtagtccggggccgggacagccaccgcagccacgttattctgaacgctttgcgtgttctgctgggtaacgtttgctgcgggcgtaccgatacggctcatatcgacgttattcaaattttgcctgagttgatcaattgattcattggcgtttgttatagacgtttgatcaacattgatattaacctcagacggaaggctttgaataagtctgcttgtctcttgtacctgggtattcagctggctcaaacgggatgtaactaagtcgatttgaggccctagccgttctatcgtttgactggcagtttgcaacgatgagttgtccaagatcatactcatatggatgtctctaaaattccgctgttgcctttgaacctgagccatccgtgtacgcatctgtgaaaaactgccgccagcatcgccgacatgatcaacgagtctatctatttgctgatttgctctttctagaggggaggtatcaacgttcaattcaacgtcaatatgcgtacttcttaatgcttctgacaacgttcataccccctcatttcttgttattcctcttgttttcttgctcaatatggatgtcgagggctgcatttgcctccattagggtatcgagatccatcatcgcgacctctgagaaggagaacttcccagacatcacgagtctatacataggccagttgtcactcgccttctttttgtaatacggctttggtttgggtttcgtcgataagaaaggattgaacctctttcattaattccatgaaaccttcgtgttcatcgaaatattcaaagctcactttcggttggacaacgacttctttcatgaataactcatacatagcagctgaatttggtttacctaaattgaggttgactgcttcgtcctgaatttccaccattcgctttgttcctgggtgttgaagagtgtactcaattcctttgatagttactttcttttgtttaccgaattttgacataggttttccctccgcttgtttagtttgcatatattgaaaagcagccctattggactgctttcgcgcgtttgatttcttcttttttgccatagcttaattactgttccaatactgtatagtcaaagacttgaatctcgaactcacgatctccaatctcgtcactgaattcagcatcggcaggctttttgaccatcgcttctgtgccgccgattttttcctgtccgcccgtaacccagatagggaaacgctgggccgtgtttgccattttattcaggtatggtacaaatggcgatcccatggaaagagtcagtgtaattgttccgagtgggttgtttttcgttgcaacactgacatcacccttggcgctgactttagtcgagaacttttcttcgtcttttgcacaagaaaccattgtgccctcggaataaccggttacgattttcccgtcaatgttcgtgttgacttcgtttgcatcataaacgtacatgctttatatcctccttaaattgagatttcaccagtgatttcagcagaatgaaccgcgccagccagttcaaaagtaaatgataggccgtcgtatacacggttttttctgttttcatctgtgatttgatcacgggtttttgtgctgattgaatacactggctgcccgtctgcatcttctgcaacaatgccatttgcaaaggctgtttgcagaacgtttgtgacctgtacactcagcaatgaaaaaccagcattcgagaacgggattttgccgttgtttgagaatgctgattgtattgaggtttcaatattcaatttcacccaatctttgccgtgcagcacgtcgatatattccccggatgcagtaatgccctcggatgtctcgttgtggcccgctttggttacataagcaatagccccttctgtatgcagctttttcaactcgtctgccttaatatcttgaggcgtgatgccaacgatatttttaaatttccaagttactgatcccactgtatgtgaagcaaccgaaccaacaaggccagcgtccggatgctcgtcatttaacgggtgatagaaaacaattgtgcgatccttgcctttgtaagaagcaacttcttcccggtcagttacctgtaaaactacaaatttatatgatttctcttccatcgcttttgccgcttccattctttcgtccgctgtagcatcagcaaggatcaagaagtgccagtccttgtcgaaatactcgtcaaacgcattccgaatggagaatgttgcttgtgtagtcgctccttcttctggcgtttctgtgctgcctccatacgtaccgatggcaacctttgacggtgcattgtcaccctgagcaaagatagccgcagcctttttatatgctgctgtggtttccggatagtctgccttgatagcttctaatgagccatattctttatatgtgttgtgtccgtctaccttcgcaagaatcagaggtgttcccaatcctttaaggctggacggtttcactaagtcaattttgactgtaacgtcactaagtggcatatgaattaccctcctgtattttcaattcgtacagagtcgaaaacctctgcatttgcttctccatgagacacacgcgttctaaagcgtgtatcgaagccgtgacggcgttctgtgtcaatcgtgataaatgtatctcgattgccgaaaccgtcgttcctgacccatgccagcccattatcatgaagcttttgtcgcgcttcagctgttttgaagtacgctgctgtttgttgagcaagggaaatggcctcaatatggctgtttgaaatccatgtaaaagagaaaacaagctcgatgtcttccgttaacactccctgttcttcaatgcctctatgttggggcaaatacggggaagtcacggtatacgtacaaaaaggatagacaggttgtttccctgtaccatttgcaacgataacgacatggcctgttttctctctaatcagtcccaggactgtttgtattatgctgttgtagtccatctgaattgatcaccgcctttaagatatagctgttgaaatcggcatacgtcccataaggcgtcatcgcttcaacatcaaaggtggcgccatcaaaaatcacctgagcttttagaggaatttcgttcttgataaatagctgcctgtccatagatgtaagccggccgccagattgatagacaagttgtgactgtaaaggtactattgcccctctttcatctgacttcgtcggtttcggtggcacccattcgccgagatcatcatatgaaccctcttcagatggaataagcaatgtaaaatcaacgctgtaccgcttaatcagatcagaaaatatgaaatgattccccatcagctttcaacctcataatccatagagccaatcatttccccggtatcaaccaatggatttgaagagcctttctcttcggttgtaaatggatggtttgccgggttccgcaagtctcgggcatacacttgaagccgccctttcgcaagcaggccgactgtttccatgatgtcattcatcgaatcgccattctctaacgctctattgaccagatcctctaccttttgaacgatctcttcctcgttctcgtcccatccagcacggatgaaagaacgctccggaatgttgatatattgagtttctttcttgaggtacagcccttttgcagcaaggtagttccgcatgcgatcagttacagcaatacggcagccaaattcgtgaacagccgcgatcatttgccgttcactgtccaggattccaactttcaccttaccgacggaaccgaggtttcttatgacttctggaatacggttgctatctcgtacccggacgtttctacgtgccattagatcacctcagtgccctaaagcgtatttttctgtagggtcggaataactcatgaacaggattgagcctttcttcatcagctgcataggatctactcatgcctccaattgattcagatagaacaccggacgggctttctctgtcaatcttaattaatagggcaatccccttttttacggccggaggaagagacacagtattatctggaccaacaaagagattgttgcagtatgccatcgcatatgaaatactatcttccagatcaatttgcagtttggcatcctgcgatgtgtcttcagctggaatccctaacctgacttttaattctgccaagtccatttttctcattcctttcaaagaaccggttcatatgtcgcaaaacatcggcaattaatatcattggatggatcaccgctttgtcccggcgcttctgctgttacatgaataccatttttattgatgccaagatcaaacaactgattgaccatgcgttcctgcccttctaaatggacatgatccgcatgttttgtctcacggactctttcatcgccaacgttgtgccaggtctttttcatgttgatgccccgtgactgagcttttttagcagcgtcaagcgttgctttttcccttgtgcgatgcatttctgtattggctatgcgcttcgatcggttgtaactcaggccgacatctgtctgcagctccttcgctatctgagcaaagcgtttccgctcaataaaaccgcgttcgattgtcttgttaatctgctgtattgtctttttgcgatcagtttcaatggctttgtccatttgtttacttttaatagcctgctgaacgtctccgggagcccattcagcaggtaaattcatctgattcagtgttgcttttggctgcgcaagtttgatccctaacgcagccagaacgccaaatatcagccagctgtaagatgattcgtaggtttcttcaaggaattctataatcatagctttgactttcgctgaaagatcactaatcaacgaggtgatttcccgctttatacggtttagatcaccgtgtcgattagcgtcagcaagtgtcggttcttcgatttgatcaagcttgacgaataacgcagtcagctttgacagcacctcttttgaagcacgctgaaaaagccgcttgagtttccgtaagaattccttagttttacggttcaacggcttcaaaagctctttttcagtttgttctttatccaccgcttaccctcctactcctcggctgtttctttggcgtcagactcttgtgtgtcctcggcttcttttttatttgtgcccttgtccagcttatatccaagtcccttataaattacctcgaaagcacgttccgtcacttccaaagagtctctccccttcttgatcctaaccattaggcagtggcacctccatcaacagcagggactaaggctgcaaaggcatcctctgcaagagtagtgaatccgacttccatagttgctcgaagtgcgaacatgtcacgctcgaataagtttagaggttcgccggcttcatctacagttgttgtcaacgttgcatcctgagaaatggtatattcaatgtcctgaagaataccataacgcgcatagtcccaagcccctgtaataaggtcagcttttgttttatcccatgatttgctgtcaacaaacccaataggcaacccaagagcttgaggtgttgcatctgctgtcacttggttaaatagtggcagcccgttattatcttttgcagcgcgtaacttttgacggaaacgtctaatagttgtaaatgcatcaggatctttgtctgcatcttctacaagcgccattactgcagcgagatcgtcataaacagttgcccctgaacccgcgccagtaccagatgtgatcttttggccggacttgttgactctttccatgattgatacacctgtctcaaaaggcgatcccaccccaaacagtgcggcttggtcaaacttgattgcaaaagcttctctaatagctgattgcatttgagtaaagaagtcagcaactgtgtagcgtaagaattcttttgaaactggaatgataaccgcaagtttcttcgatgtcatttttgctgtgagccatttggcgctgcttgtttgaatgcgttcaccttcaccaacccagtaagcgccaggtccttctgctaagtacgtgaatgtctttaccggttttgtcatcggttcatatttagcaagctgtgtgattgcagatgtctgcataaattctttcaacacaatttctgcttgttcttctgggattttcccagttactgcatcttgtagtaatactgttttgggattaaatgttggcataatagccctccttattttctgatatttgcttggttagcgagtgccccaatatcaaccgccccgccagctggtgttggatcacctttttcgaagttagtgccgctctctttgaatttgatatctacagcattttgaactgctgcattgaatgtctcttcaaacttactgagattggcaagtgttgtttcctcgtcttcgccaataaaatagtcaataactcctttaggcagcttcttttcatccgctacattcaaggctttattgaccaatgcttcacgatttcttgctttttctgcatcttctatttgttttttgagcttctcaatttctaattcagccggagatttatccggattgcgttcacgaattttctcttcaacgatgctatccaaattgtttgccttccatgttgcaagaccttttgtgaagtaggaatccaggcgtggctgaatgaatcgttttccctcttcagtttcaaggaacccttccaccttatctgctgatacggccgaaagttctcccacaaatgcttttacttgttcattgtctttattatcttcgagaaattttttcacttcttctaaagttggcattacgtttcttcctccttcgccctctacagtacgcgcctgttatgagtgcatgaaaaataagcctttttaaagtcatgctcaggacaaatacagatgatcactttgcaacctctttgaagtcatcctcatgtcgattcttatgccagtttctcgttgtattgtattcatttttcgctaattcccattgccatatatctatttcagcaggcggattctctccatttgacaacgcaattgctttctccatagctttttcgaatgtagggtagattcctaccttatggggatagcagtcataataatcatcactcgtgtactcaacttcaaagaacgtcattacttacacctcgaatgtcatcattgtccttttcatcctcaaaatcataagcatcttgttcagctttcattctctcaatctcgtattgcacatcatcgacaatagagagtgttgaaaggcgtgtctcttcgcttacctgacctttaagttgtccggatgtctgagcctcttccaagagatttgacggcagattgcgcttgaatgagaaccatacctttaaataatcacctgctgatacaagaccttttttcgcccatgctgagcaaagcaatttgtactgataccgaagggcagcagtcgttttcctctccatcgtgatgcacttattttcaagggccatcagcttgtatttcattgcaacgcctgtcacattcccgccgaatgattcatcagagaaattgaccgactttgcaaaacgaagaatgttttcttcaagcctgttcagatggttttcgatcatggtgtcattaatgtcttttgtcaggaatttggcatcatcatctttcccaaacatttcaagcacaccggtctttttcagttcttggatgtcttcatcatccataccagcgccctttaaaatcaaataagctagccgtagctgttcaatctcgtttgatgcatctgaaagtgtgcgatcgtatgcatctataagtttaattaccttttccacgtcgcccatctgttcatcattgttaggcaacccgaataaaggacaataatcaaacaagtggagcttcttctctaataaagtccagccacctttttgtttttcgaaaaaataggccatcttgtcatcgtaaaaagtggctttttcacgctctatgctttgattattgacccaatcaaataccttataatatctaagtgcgaaagaaggctctgtgatgtcattctcagcaataatgacaacttcccatggatttacattcgcaactcttaccgagccgtcaggagcgatatacacaagtctagcaccatatccacaaatagctgctttcttaccccattcgctatcagcatcagcaatgttatttatggtgttaaagttattgatttgctctgccaaggccgtatttttgttttccccgtctttctccgtctcgtatgagattggatggccgaacatatacccaacctttgtatccactatctcagcatcaaaagcattattcaggcggttgtttaccagatggtcaatacgccgaacctttcctgtttcaaaatcatcgaattgagctgcctcccgctgtaagatcggcacaccggcaacactagccatatatcgttcatactgagctatggctttatctttgatcggcttatgctcttcaataatctgttcaatgattggaccgtctatctcattatttcgaagataatttaaaaacttgttcatgttctcacccctttcctttgcgtctcataggtttgttgtgtgtataaatggcatatcggatagagtcgagcacatcgtcccactctttaactggctcgcctgtatttggattccaaacatacataaagatctcttttttaaagcgactaactttatcttcaacaataaaaagcagatcccgtttgaacagccgcgccacttcttcgatacctgaaacaactgccttatcagcatctaacgcacgcaacttctctctgcgaaaacgtacgatgtgttcaggccgagctgtatcacaatagaaattaatgttgccgtaccgctctttgatgtctttcgctaccttcacccagtagtcaatctcttcgtgccgcttgcaatgttcttcaagcaaataaaaacacccttggtcatcttgtccgattacgacaatagaacccgggtgatcatatccccagtcaacaccagtaaagtatttagtgaagttgacttgtttatcttccatttctttagaactgatatagtgcttgtctttgttaaaatccttgtatattacgccttccggagcaacccagtagccgtaaatatccctgtccgtaaacatgccgctcggtgttgaagcaacaatactttcgacatactcaggatcaagaaagttgttatcaaacaatgagaagtgaaaagaacggatattcagcctgccgtttttcagccgctgcccgtctttgtcgatataatccgttttgacggtgtgcattgggttttcagggtttgtatccatcatgaccattgcacccttataggagcaacgagaaatgacttccttcacgaatgaatcatgcagggcagtcgcttcgtttaggaatgcgccagctgatgtgaaaccccgtgcctttttccatgagtctgcatttgcaccatcaaagcaataaacacggtttccgaatatctcaacggcattcgctttatcaaggcgcaattcttttccaaggatcagttctaaatcatttaggatattccgctttatagaagcctgagttgccccgccaatgataaaagaaagccccatgttttgatatttgctgatgtgcccgaggaacgtcaaaaggagcacgaatgttttccctgcccttttcgccccgctgcatattaagattttcggctgctcttcaataaagctgttccatacttcttgttgcttagagttaagttccatgaggtttcaccatcttccgaagcatggcagcaacttcattttcttgagagtttccgttatcaccatcaatatctttcttcgccttctcgatattcaagcgcatttgctccaatttaaggcgacgttcgtcttcttcatgcgccagtagaacaaactgttttatcaagcttctgagctctcccattgcccgagattgagcattcaggaatgtggcctgacgatcccaagcgaactgtatttcaagttcttcctcaacaatagacttttcaaaatactcgtttccatcttcgtcctcttgaggttgataaacgtattttgcttttttctgttcttttacaagatcatctttatcttgtacgaacatgataggctgcgcccgaataatggctgcatattgaatctgtatctgatcccatataatatcagcaggcgaccgttcctgaatctcttccatgatttcaagcgtttcttctggcaggaatttagagaaaaagccgtgagtcatagcgttttgattcctctgtggtgcgccgccgttattccctaatgcattcttattgccgggtggtgcgcctgccttttttgtgtgcacacttttttcagtgggtgcacccttttttctttcccaaccatgccgctgtttccacgattttatggtgttcactgacaccccgtatttctcggcaaggtccttgtatttcatacctttgacgtaatctttctgcgcctgaatgtgcttctcagccatctacattcaccgccgcccccttttgaattgagttgttttggaaaaaatattccctctaaaccaccaccgtgctcaagccgttaaccgccaattgtctatcctgagacttaccggaagcagtttacagagaacataaaaaagagccatatagtttaatggctcttcctttattcaacaatttcaatatgtgtaatttgagttgggttaataagaatagattcaccaagatcaatcagacgatttttcaaaactctttcaccatccaattcatcatgaaaatagtctataagattttccacatctttcatatcttcataagaaatttcaaaagattttttattactcattagtataaacactttcataattttcacctcccacctaattatcggataaggagtgtgacaagggaactatttgcaaaatttgtcgaacgaaagcgcccttcataaataggtggcagtcgtaagacaaaaaaagcatccccaagggatgccttatttaatcaaatctcttaattctttaattgtatggaaccattcgcaaaatttgtcgaacaaagacaaaagaatatcactttttgtttcttttttttcggttgttttttgtctgtgtttctatttgcacactttcagtttttttgtttttcttctcttcagtttctaattcttcaattgcttcttctaatagcattttataagtacgtagttttccataataattaagattttttgtcacaatccatatccagagaccgattaaaattaataataaaatcccgttaaatattactatataccttccgaaggttaaacccgttttcacaatagtatctaaaagttctgtcggatctatagaatgttttttatcaatatttactgctatgttggagaaagcattaaaagtgttaaaataaaacgtaaaaatacctattagaacactgatgagactcgtaaatagtgatgtatatatagcaaatgggatagttttaaaagaggaaatgtctcctgaaactttaaggctgttattcaatctggaaattaatttttttatttgttttggttctagtttctttttgactttctttttaaaatcttctccacttttaatattggaatcctttttataaggtgtaccgaaatgctctaagtatttagatacatgagttacttcgtcaaacggaatttctctaatttcacgattatctttttttcgataattaaacacttttctccataattcaaccgctaattttttcactatatcacctcctatattttatcggacagacgacaaaacttcgaattgcttgcaaaatttgtcgaacgaaagctctattcaaaaagtcagtcttaagacaaaaaaagcacccttcagctgcgggtgctcatttcttcctatgcttctggaattccaatatatcctctttaataaaaagcctgtccctcggcatttctttaaccggttcaagttgaccggttttaattagctgattgagatattgacgagtaaagcccaatatttcaatcgcttcacttgtattaacgatctcctcattcaagaactttttaattgcatcacgctctttaaggctgtacaccaagcatcatcctcttttttctcgatatttttgataaagggaaattgacttttccacaattgaaacagcaaacaaaacaattatgcatatatctaaagttgtctttaatggactggctgcgacatgctgtcgaacaaataacatgtatcccaaagcaagaaggacaaaaatatcagttgacattcttagtttttccatttgtttgaaagtggctgctttcatcgttatataattatttgtgtcacttatgttatacttggagcaagggagaagctccaccttctccctcggctcaaaatcatctacgctttcttggtcgtctgcgtcttttgattttgggcttttttgttttaagcttttctcttatgataagagctttttcaaagatagtgagtgctgtaagtatgatgcccagtatcactgcaattttagccactttcgttcccccctttctatactttaattatatacgattactttactcacgtcaagttaatttagagaattttttcctgttttctcataaaaaacacctattcatgctaaacagaataggctgtgttctgctctatttttcattttcaaacgggaacgctcaatgtttttctggactgttccttttttaatgttcagcagctgggcgatctcctcgaaagacatgttttgcacagtatgcatgatgaaaatgtccttctctctttcagtaaggacagaaagggcatcagcaattctttctttgtcccagtcgcttacctctccttctggctcctgattgatcgcatactcttctggcattgcatcaatgatacgaggatcagcaagaatcgttctttgataaacgtctcttctgtcagctccccggcgtgctcccggttgtctcccgttctgcagccattcgagagtgaattcaatatcgctaatcatactgccaatgattttcttatcattcttttgttccgctgtcatttcattttctggtgtttctgagaatgcccggtacatctttctcgcttcttttaacgctcttttgtattcaatgattaaatcctgcatgtttgtcctcctcttatttacgcttaaaagcgccgcctttgcatcttctgagtgtttgcctgtctcgcctgccaaaacctttcagaacgctccttcgcgtttttactggactttttcttctcttgtttcatttcgtccctccgttcaaataaaaaaacggacaccaaccaaagtacagaattctctgtacagtgatcagtgtccgcaggctttccatcttggactttatttaaattaaatgttttttcgctatagtaaataatggcatagctatatcaaataaattcttctcaccaacttttttatagactactatatttccatccttcgttaacaagacacttagaatatcatcttcgttttctattggattcggcacatctaaacgcaaagcagaaataattccatcactttcttcataagaactccaattttgactcgcggtaacagtacccccacctaaataggcaacttctacatcggctatttttaaatctctccaccaaccaccttttattgcagcattatcattttcttctaattcttcttttagttttcttaaatctatagttatagcttgtgagttatatcggttatccccacgtcccacagtcccatcgattaatcgcttaatcccgtgttcaataattgattttttggaaccccaaaaatataaaaaatcatcatctgatttagccacattgaaagtttcatcagcagaaatagcaattatatcgtgtgccgttccatcttccaaatagccttttcctgtaaatgaatctcctattggatgtattacttgatacttttttaaatcttcttctgtatattcagtactacctaggtttttaagcgtagttttaaaagattgactttcagaaccagtattaaattcatttgtttctaatggtaattgttctgggaaattgattaatctctgcataataattgattgcggcatttaattctctcctcacaaaatcaatttaattactttgtccaaagctttaattaaagatgttctttgatttgtcaccaaaactatattcttttcatgcgcacttaactgtacaccaggattacttttaattttaatattaaaagataatatatcagatggcttaacctctttaataaagtgttttttcatgaagtcaacttttttagtgtttttagcaactttcattgtatacttattctcttccacccctaaatcatcacaaatcctctggtaaaagtgaactataaaatcttcaataatttcttgtccatttttatactttaaagtagcagatgcacttacattcaaattcatctgaccaaaattatctgtttggataatcgagaaataaatcttgtatggtttaatgtacattttaacgttgttaaacttatcaaaagagacttcgactaactcatttttgcgccctgtatgacctttattttttagtaaatcataaaaaattgtttggacttccgtataatcatctttaattttttgtagagttgaattttcgactatgttaaaaaccgcttgaaaatctatatcaaaattatcgaaattaaagtgatttttcacccatctaaaacccactctaaatttttgggatttgtcatatatagttttaagtaaagctgctaatgttggtaaaataatgattcctgttgcccaattaaatccttttgtgtaaaactgaaaaagcattgttgcaagaagactgagtagcattaaaacccacatcatctagcccccttatctaataatgtcattaattatagccataagatattgcttggtaaacattctttagaattaaatcaatcaacttcctctgtctaatttacaacaatgtttatcttttccacagttttcagtacaataataccatttattttcatattttttctaatttttttcaccctttttcacccctccatcgttttttcttttttgatgaattattttcaaatctctatttcctcctcaactcaacgcccatgctgcagccgcatttcgggcagcgtgcatctgggcggatttttatatctaattcgttgtgaccacattcaggacagctgtattcgatcatggtgtcaccccctattcccagccgactgcaattgcaaagaataaaaccaaaaccatcgccccgattagccagccatttgtcttatcacgctttgcaatgattgtttcatcaccgatcattttcaaatcgtctgactttgccacgagaactggtatgtaatctggatgcactttcaaatattccgccgcctgctcaactgtcatcgcttcgtctttcgtggctttgactgcccgctgaagctcaacttgtaaaggaatcatttcgcatcaccttctttcccaagcgaatcccaatcaaacgtttcaagaatcttaagcaaccgttcaacttttggtgctctccaagctgtcatagcgtacgtatgagcttctgaagtgtaatggtgcttgttcaatttgatgtggctctttgcttctgcttttgtcaaaaacattgtatttggttgtataatgtgaacctttctttctggaattaattctgcttcttcatcaatgtatttttgaatccactcaacagcatcttcatagtcgtcctcaatttcttgcaactctgttaaggcttccttagacagctcactatcttcttttatttcttctagataatcatcaaaaacataggcttctgcaatatatggcaggtatacagaataacgctctgcgttttcctcccgagcttcaacccattcataatcaccgactgtccaaaaccgtggtgcagcttgagaatcacgatcctgtgttttcaattcattttgaagctctttcaaaaattgaatatccttgttcatttcacatcaccctccaattcattttgggcaactgttatcgcgaaattgagattggtaatgatcttctctaatgcctgtttgtatcgtttcctatccccgcttaaatgctgaatgtccttttgagcctgccggaattgatgaaccgttacttcctgctggcgtttgttttcctcgatgatttcccgctgtttttctactgattgaattagaaattcttgatcctcaagaatagtggaccaattaacatcaattttctttttataaagtgaagttgctattgaaaatctattttttatttcctgtaatttatccatgccgttcctcccccgcaggggaaagcccctgctatttgattttgaaacctatttcgtgatcgactcgagcaaagcttccctttgccgtttgaatgattgttttgccatgctccggggcttccaagacatgtgcggtgccctggctcccgtctaaaacgatgatctgtattttgcccgactccattgcctgttcgattgttgtatctttgcttaaattaatttctcttgggttgtacattcttagcgccccctgtgctatgatagaagtaccagttcatatcagagcatcggggcatacgcttcggtgctttttttgtgtttaatagtgatccggtttccatccagtcattgtgaatgttggcgatggtttcagatcctcacggtaaacgatcgggtgttttttcacgtattcggccagctgttccggcgtcatcttccattcttcaaccggtcctggcaggtaaggattgatgctttgctgttccatggtatctacctcctgaattgattttgggaatttccgtgccgccgagcttcttgcaatcagaacccattcggctggcgcatgccttaaactgagagcaacgtgtcatacaggccatgagcttatcttcttcctgcacccacaacggccgatcgtctgcgattaccacgtttagcagtggactttcccgcctttcttttgagttttttcagctcgtccagctcgatgaagccgagtgacttatccagagccagcaccttgagtggcgtatcgtaaagccgctcatacagcttgcgcttgatggcaaattcctttgtttcaacgcccttgatgtcaatgatctcgatgctgccgtccaagttatgaacctcaaagtctgcaatatattcaatcttccgaaaagttttgccgttctttttgaatgcctcttgcagcaggaaccgtggctgcagcttaaaatctttgatctgcttgctcaccttgagccatttcagctgctcatagtatttggcttcggcccggctgtcgaacgtgatgccgtctacctgtgtttttcttgcgccgtacttatttgctggcatgtgatgcctcctgaaacttattcttttgttctgcaatctccatttctgacatgccgcagtcaatacaacattcatagtcaggtatttgcaaatgaccttctcccggcatagtgcagtaactcatttccatgtgtttatgttcacaggattcctgacgttttttctgttcagcctctttgacaaccgagcagtattctctttcgtgcaacctagcaccgtgctttgtcatcagccgctttccgcaatgttcacactggtaaagcgtctgattttctaacactttcattctccttacctcccgtcactctcttcccattgctgaatctgcttttcttttgctggcgccgttagtatgattgccggcagcagcatcaccgctttaagcactcggcatcagctccatttgtctgatcttttcctcaagcacctggatagctggtgtgaggtccttgccgcccttttgttcagcaggcccgaacaaatacattcctttggatcctataacgttcgttttctcgttcaatcccaatcacccaatctatgatttaattccatccggttgccctgaatgatcaccgtgtaatacttgcacatctggtaaatccgagagcccagcgcctcgtcaacgtccagcagatcgtccgttgtgagctcagaagagatcagcagaggtttatggttcaggtagcgataattcacaactgactggatctgttcgacttgccattcagttgcccttggcttcccgtcaactggcttgaataagtcatcaatgaacagcacatctgcttttctcatggcgttcagctttgtttccagctggtcaaagtcatttttcagatcactcatgccctcaacgtaagggaagtacaggcagtgagttgatttcttcttaatgagattgttcatgatggccgttaacagatgggttttgccgctgcccggctgtcccagcagagcaatgctattggcacgctctcccttgatcttttcaaagtctttgaagtattcgaccgcacattcataggcatctttaatcatttgaggtttgccatctaatttgaagttgccaaacaacagcttttcgaacttttctgtaatgccgctggctgccatgagcttcgctattttcttttgtttcacacactcacattgtttggaatacgtcgttttccattcccgagccttatccggcgtgcaaacctttcctgcaaggtaatcatcttcaagaaccatttcatcaagtgataggctgtccaatggcttgtgttcttttctcaaccgcagctcagtgtctttgtggatgcggtagatcacaacgccgcgatccttgcactcagagcattcatattcaaccttttcttctgattcggcctgttctgtttcccaggaacgcgatcttgcttgaagacccttcatcattgcttggaacgctgtgtctatactgactgctttgtttattgccatactgttgtttctcctttctcttttggcttaatgggttggacaggatcgcctcaatgtagttcaagccaacgttgctgcctttatttctgaaagcctttttcattgcctcgatgaccttctcttcgccgtaatcatccaccatgtagccgattctttgcgcctcaatggagccgatagaacgagcgaccttattttcgaatagctcaaaagcgtttttcatttttggatcaacctcctgcgtttcttgtggtgctggtgcaagttcaggaacaggcttttcagatggttcctgctccgttacaggcgtttcaaatgagatcagcctgtattgccctgccttcctcccctgcggcttatattcaattcttttaagatcaatcagcatctttcggtgtttgatcaacgtattttcggaaatctcaatctttgcttgcagagtggtatttgaagtggtgaaccactctcgccaccctgccttattgttgatgtgcaaaagatgaaaccataatgcttgagttgtagcagacaacggattcgtttctagccaattcatgaagccgttcatttctttcaggtagttcatggctcacctacttcctttcacacagtgctgtcattccgctgatacggactaaacgtaagccaggttcatttgttctgagatagccttcaacataagcacggaacagctgcgcgcgatttggcgccccttccgtcagccatttgtaacagaaggggatgccgactttaatcaaatgggaggtcatcttcgctgatgtctacaggcttgccgtcaaaaggatcagcgtcctgcgcgcttggtttttcctcagatggttcggcatcaatgatttctggctcagacatttcgtcagtgatgtcaatgcgctctcgttcctcgttatcctcaataactgccttttgcatttcaacagagagtatcccccacttgctgagcatggattttagaacggttttgagtgccatcgcatcccagtccttgccccaaccgaagtccgacttgctaaatttctttttgtgtttctcaacttgcgcctttgtccaatagacagtttttcggaatccatttaaaagctcaaaataagcagcgtaaccaataaccgaatctgattcccgcttttcaaaatcaatatcaatttcctcggtcaacggattccacttttgcaattctccttcatgaaccggtatgcaattgatagatttatattggcccgtccgcaaagcaagctgaatgtatcctttgtaaccaagctgaaattgcgcacggcctttatacggaacgatccaggcataacctaagttcttatccactggcaaatcgagcgttgccgccaccatagccgatgaaattacactcatagggtctgccttttgaagcgtattttcactgttgtacaggctcagaattgacgctgtgaattgagacgctctttttcccagaacttcttcgaatcgattcatgactgctggagaagaaagcaggcccttcatcgttgttccctgctgttgtcctggggcactgttttgtttcttctgaatgctgtttttaagcgtttgatttgtagccatattcagctaacctccttaattccaaagcgcctgaattgcacttcttttgtgactttctcgtatacatctggaaactgctctttcaatttcttgctatcgatccgattagttgaaactgacttccagctagtttgatagtttccgatgaatccatattctgcttccttcatttcatgtttgatctggttttctaattcctttgcctgcaatgacagctcgttgatctgctctttcagctgtaaatactgctgaatacgtgttttattatcagatgtgagatcaacgactttgccgccttctgcttcggcataacgttgcttgagatattcttctgcagcactcgaaccgtcaagaaccggagcctttccgcccaagaccttttcattccaaaattcaatttcggcctgaaagatcattgcaataagctcgtcatcgcgctcaatctctttccaaacgaatttattgccgccgatcagtacagcaaaatatgcttttttatattcaggccccagcactcctagatagtgttggacctgaacaatatagctgtcaggaatctcgtcatcttcccactctttcaggttgtatgccgatgtggttttgcactccaaaatggctttttcgccaacaatcattcgatcaacgtttgccaatataaaaccgtgcttaggatgcctgagcattgcttttctccgccttacttttttgccgctacgtatctcaaactcttttgcaacgatatcttcaaggagtgaaccgaagtaggctgcctcacttcctgattcactcacaggtacttgacctgttttgtctaaccataattcaaacggtgttcgccatttgtttatgcctaaaattacagaagcatctgaaccgccgatgcctttccgtcgctcaagaagccattcgtcccgactcatgtccgctgtcgaagcgaaaacctctgcttgcatcagagcagccccacctttcttttgtaagcttccgcaccaagccgctgccattcccggtagtgatccattgaaggaaaactaaactgcgctttaccgtttttggcgaatacaattgaaccgccgacctgtctcaaacgttgctgatcctccgcacgctcgctgaacgccactttaactgctttagccatgtataaaacctccattgattttcttgaggctatctggtagaatattgatatatgagttttcagatagcctttaattaagtccactctgccaagtgggcttttttattgctcatttttaaattcaaaaccaagatgctcctttaagtaccgctcaaggttttccctcaagatgacttcaccctcagcgctatctatcacgtaatcgtcgaaaggcgttacttcatccccgaaaaaatcctttggtgtttctggctcagtcagcttgtcgtgccaattgtttagaatcatcgggttttcgatcgtcattcatattctcctttctgtaattagctatgcgttcatcccaaatcagataaagttcgctatgatttcggattctttcacaccatgctctgacctccaacgctgtcgctggtttatgaacaaagtgaaccatcatcctaagctcctgcgtaccactgataaatcaattccacgctgtttcagcctcatcgctgcatcatataagcatcccttatttgaaatccgtttaagatcctcaatgtttgctttgatactgccaaggatgtctaaagcttcctcgtagtcgccttctttcaaagagtccagtaatagttcagccaaactttcaactgaatctgatttccgttttacgacttcttcatctgacttcaaaaaatggttgagtttcatacgagcatcgccttcctttcctcttgttttgacatagcaacttgatccattaacgctttccgcgtccatttgtctgcaagctcctgcattttcagaccatgacttcgagataaagcataaaagagagtgtctacagctggaccaaggtcaagaatctctttaagatccgccatcggtagcgcctcaatacggccggggcgttcattcgccaaccagagcgcgatattttcagcagcctcaagggattcctttgtctgtttcataaaattgatcagggctttactggggctgacgttcaacgccggatcgactggggctgttgccctcggatgaagccggaacaagtaatgtacaaggtcaatgtgctcataagcgccgcatatctcaaaccatttgatgcaaagttcaggcgttagtgtggtcaggccattttcaacgtctgatacataccgttgatctttgccgccaagtaactgccctaattgaaattgagtaaatcccattgtctttctaacctctctcataatttttggtaaattatcgagtttatacgggttgttcgacatatgttcgcctcctgtttcacggggaattatttggtaaaatttaagtaatgaaggaactagctggcttgctgttttttcagcttattgatgatgaaggcttgtcccttcggagtgatgcgcattgtcagccaggatttcggcgtcccgtttacttggcgcaccccctgtgcgatctcaaagaaacctcgctcgatgtattcctggtatggctcattcttgttggccatgatcatcttccattcgcgcagcttctgaaacagtcgcttttcaccaatcatgatgccgtttttcgaagcaagctttgccagttctctcacaagcaatgatttttcggccgccatgcaactctgtgcaaagttgaccaatggttcctgaatcttcaatgcttgttcaagttgctgccgttcttcctgctcgctgatccatcgctttgcccggctgactggatcttcgatcatgtaggacggttgagtcattttttgaagctcggcttccatccggttaaattcagcaatgtatttttctttgaacactgctgcttttgcacccgtataaccaaaaaccaaaaatgcgagtccatcacgtttgatcagatattttttcaatgatcgtcctgttggatcttcatattcactcaacgaaaaatttcgttcagtaaaatctttagagcaattcagtgtttcaatgctttttattacatcggcgtgtcgttttccgaatacctcagccactgttaggctgtctgttacggcttggttgccttcaataaaaacaatttgattcatgctgttacctccttgcttgtccaccaaaaaaaggtgaagcagataattaagcgtgaagccttaattcttttttagaagtgaagtacggctcaagagctttacggaaacactcttctctgtccatcgttccgtaatattctttgcccatcttgatgtttgttgtttttttcttagtttgtttcgccatgtgatcacctcacgtcagtgtattcgtgttggacggttggactaaccaagaaattaagcagattcaagatccccattcttcatttcgtggcattcttcttcaaaaaaaagagtccaatcaaaatctaaaatgtttgcgatcttttttgcgacatgaggtctgacattcctttcgccagtctcaatggcaccataagttgatcttgcaatgccaactttgatggcaagttgttcttgcgttaaattggcatcttcacgtttttttctgagccagtatttcaattaggatgcctcctttcgttctacatatcgtggcttatgaatacatattaaaccacgatatgtagaatgtcaaacctttttattaaaaaacacgtaatattttcttcatttcgtggcatgtcgtttaattccacaaaatgtagagttataatgaatttagaatttacctttaaaagttagtaggtgatattatggcgattaaacataggctagtcgaattgaggaaaaagcaagggcctcatgtgaagcaagaagatgtggctaaagctttaggtatagcacgctccacttacggtgcttatgaacaagggaaacgcgaaccggaccacgctactctaataaagatagctgattattatggagtgactatagattacctactaagagatgagccagagaatatgaaaaatgaaatcttcaacgaacaagcaagaaagattcttgaagatcctgatactctggtagctgctgctgatggaaagataacagcttcaattttagaggcagctcaaagaattattgctgagcaattaaaatcaggtagacaacccggagatataaaaaacgggaacaaaaaataattacataacgatcgctttatctttatttattattattgtttagtttagtttagtttaattaatgctgaacacttcgcctcaaaatttgaggtaaactattcagttgaaaccatttcaacctcaatttttgaggtgatccatgaggttatttctgcattcaaccgcaaattttgaggtaaaacattcagggtttttcactcagattttagagagaaaaagtaaaaaaatcctttatttagacgatacaaagaaagagattgcacttcattataaaaggggaaattacaattgaaaaaatggttattaggtattggagcattgactcttagtttttctttagctgcatgtagttctgactcttcaagtagtaatgaaaaatcttcttcaagcaagacaagctcacttagtgctgaggaccagtttaaaaaagatgcaaaatcatatgcctatgaaaaagtaaatagcgccggcattaagaaagggacaaaaattgtcattgaaggcgatgttacttatgcagataacgtcaatgatgatggggatacagtttctaaaaatgttgagtttactgtaagtaaaaatagcgatggatctgaagtttacacagtaagcaataaaagcgctgataagttcaaactaaacgatacggttaaaatttatggtacatatgaaggcagagctgaaggaagtgcccttcctaaagtgaaagccgtttacgtcgataaaattgataaagaaaaagagcaagctaaacaagatgctgcactaaaagaacagtttgaaaaaactggcgaaggtgatattgaaggactgggccacgttaaagatatcggcgttggatataacgacgaagtcggaattgacggtaaagacactcctataaaacctgttacgatgggcagcatgaagctttatattaacagtgtcgacgttctcgaaattcaaccagatgatgatgcaaaatcactttattttaatgatcaagataaggttcgggctattgttgtcgatatgaaggccgaaaacacttcttctaaggacgtaacgtttgaccctaaccaagctgttattgttacaaatacaggagaacagcttgaatctgaaatgggattaatgggtgaagtaggcggagacttcttagggaaagttaaaaaagaaggccaggcatggtggatacttaaagataattcaaaagatatcactagtttgaaaatgattatttctcctccaagtgatgcaaaaacctatgatgatttaggaagcgagaaaagactagattttgatatcttgagttttgaagaagctaagaaaaaagattcaaattaaattgagcccctaaagggggcttttcttttcgctaaaaagagaacatacgtttgttcgccttcgacaaaataggtgataagatacaataaagcccatgataaaagtcacatctttggttatttaagggaggtttcatctttgagatacactaacagccatttagaagattggattgaacagctttacagggagatcaatattacaaagccacatgagattaattttgatagaattgctcaggccttggacatcttaattgtttacaatccggaaacgagttttgctctgcgattcaacggcatgtatacaatttctttagattcacgaaagacacgacaggaacagtggctggattttgctcatgaggtttgccatgattttagacacatgaacgatgataagatcatgcccgcttcgtggaaacgttatttagagtaccaggccaattattttgcttatcacttttgtatacctactttcatgctccgagcaatggacatcccccgtaatctatacgacgcagttcaagtcattgccgatgccttcaaggttccagagtcatttgcgatgacccgcatcaatatgtacttcaataaaaaacgactcatcatataaaaaagagcctctaaagggctctaagtttgcgaccggtatgcataccatttgaaatatggtttcgaacggttttctcactgataaatagctcgcttgcaatctcctttgttgtcttatcttgaacgagcaattcgaacacttctctttctcttttcgttagcagcggcttcgattgaaattctttctccttcaagtattgtaaccctccttgctaaggtgagagcgaatcagaaacgaatgggttttgatatagtcgagatatcatatgtaagaagggcgcaggaggtgacgtttacaagataattagtttatcgtgtatgaagaagcgtttctttctcctcatctgtccagctgacagctttgccgctttcctttgagacttgaaccatcacgactgccccggtgaagcagggttcgccttcgaggttctctccgagatagtgcaaggtaagagatgaactgccgactgcgcttgttttcacatagatgcgcaactcttcataaggcatgacttggcgcaaataatcgcattgctggcttgccacgactgtcatggtctgtttgttttcactcatcatattcagctttttaaaataagaaatccgcgcctcctcaaaatatataaaaggggttacattattcatatgcccaaacatgtctgtctcggaaaatcttacggatacctcattgaaaaaagaaaaggatgttttccattcttgaaacggcatatcaatataagcgggaagcttcatcttttttcatctccttattgtttaaaaaaacctctcccatgcggaagaggttttttcttcttatactctgtcgcttccgaagaaattgcggaacgcttgtaagtttgtatctctattcaaggctgcaatcgaagtggtaagcggaatccccttcggacaggattgaacacagttttgcgagttaccgcaatctgcaaggccgccttcatccattaatgcttctaatcgttcagatttattcatggcgcctgtcggatgcgcgttaaacaggcggacttgcgacatcggtgcaggccccatgaacttcgatttgctgttcacattcgggcaagcttcgaggcagacgccgcatgtcatgcattttgataattcatatgcccattgacggcgtttttctggcattctcggccccggtcctaaatcgtacgtaccatcaatcggtatccatgctttaacttttttcaatgaatcaaacattctgctgcgatcaacctgcaaatcacgaacgactgggaatgttttcattggttttaaacggatcggctgttcaagctggtcaataagcgccgtgcaagactggcggggttttccgtttatgaccattgaacatgcgccgcatacttcctcaagacagttcatatcccatgtgacaggggttgtcttctcacctttgacattaaccggattccggcggatttccatcagagcggaaatgacgttcagattcgggcggtatggaatctcaaattcttcatcataaggcgtgctgtcagctgtatcttgacgtgtgataataaatcgtatggttttttgttcactcatgattatttcgccaccttcttcttcgagtaatcccgtttccgaggcgttatcagtgatacatcgacatcctgatactcaaattccggcgcttcatacgggcttacatgtttagccattgttgttttgagccattcatcatcattacgttcaggataatccggtttataatgggcgccccggctttcattacggttgtatgcgccaagggtaatcaccctagcaagctgaagcatgtttgagaactggcgtgtgaacatcgctccctggttgctccattttgtcgtgtcattgatgttgatctttttgaagcgctccattaactcctgaattttgtcatccgttttcaaaagcttgtcattatggcggacaaccgttacgttcgccgtcatccactcaccgagctctttgtgaagaacataggcattttcggttccgtccatactcataatatcagcccatttttcttcttctttcttaacgtgagcgtcgaataaagatgaagacatgtcttccgctgaagattctaagccgtttacatatttcaccgcattcggaccggccaccatgcctccgtaaatcgcagacagcagggagttcgctcccaagcggttgccgccgtgcatagaataatcacattccccagccgcaaacagtccagggatgtttgtcatttgatcgtaatctacccataaaccgcccatagaataatggaccgccgggaagattttcattgggagcttacgcgggtcgtctcccatgaatttctcataaatctcaatgatgccgccaagcttaatatcaagctctttcggatctttatgagacagatcgagatataccatgttttcaccgttaatgccgagcttctggttcacacacacatcaaatatttcgcgtgtcgcaatatcacgcggcaccaggtttccgtatgccggatatttttcctccaggaaataccatggtttgccgtctttatatgtccacacgcgcccgccttcaccacgcgctgattcactcatcagtcttaatttgtcatcgcccggtatggctgtcgggtggatttgaatgaattctccgtttgcataatacgctccctgctgataaacgattgatgcagcagatcctgtattaatcatggagttcgttgattttccaaagatgattcccggtccgcccgtcgccataatgacagcgtctgaacggaaggattcaatttgcatgtttgtcaggttttgtgcaacaattccacggcaggttctgtcatcatctaaaacagcgccaaggaattcccagccttcgtattttgtgaccagacccgcaacttcgtatctgcgcacttgctcgtccagtgcgtaaagcagctgctgtcccgtcgtcgcaccagcataagcagttctgtggtgctgtgtacccccgaatcggcggaaatcaagcaggccttcaggcgtccggttaaacatgacgcccatccggtctaataagtggatgattgaaggcgccgcttcacacatcgccttgaccggcggctggttggcaagaaagtctcccccgtataccgtgtcatcaaaatgttcccacggagagtcaccttccccttttgtattgaccgctccgtttatgccgccttgcgcacaaaccgaatgagaacgtttgacaggaacgatggaaaacaacttaaccgccattcctgattccgctgctttaattgtcgccatgaggccggcaagacccccgccgactacgataatgcttgattgactcatgatagcccctctccctctagtaatctagtactcttaaacaaatgcgaaaatcgcttttaagcctacgtatgacagtgcaacaaaaataatcagcgtaacgtatgtcgaaattctttgagaacgaggcgttaccgtgatgccccatgtaacagcgaaagaccataaaccgttcgagaagtggaaaattgttgataaaacaccgacaatgtaaaaaccaagcatagccggagagctcaaaatattcgccatcatgtcgaaattgacctcagcgcccatttgtgcggcaatgcgggtttcccacacgtgccagctgacgaaaatgagggtgatgataccggttacacgctgcaggacgaatagccagtttctcatgtagctgtattgacctgcgttatttttcgcagtaaacgctatgtacacaccataaactgcatgataaattaatggtaagaagataataaaaatttccaaggcatacctgaaaggcagactatccataaaatgagcagcgctattgaatgcttcagcgccccttgcggcaaactggttgacgactaaatgctgaataagaaagatgccgaccggtatgacgccaagcaaggaatgcaatcttcgaaaataaaactctctgttcccagacattactttaccccctgtttgataagtgcgaaatgtgctaaatctcttcccccacttctttcaattgtaagcactttattaagatttattgacaatttcattttactcctccctcaaaagggcgtcaagaaaacgcgtacataaattataattttccgaattggttagttgattgaaaaattttattttatcaatatatatttcttacttaatttttcataagaattacaggatcattctgtaatcctcccccctgtttgagctataatatacgcaggagagaggggagacagatatgaagtctaaatttgaagcatctattgacaacctaaaagaaattgaaatgaacgcctatgcctacgaactaatacgagagatcgttctcccagatatgcttggccaagattactcttccatgatgtattgggcaggaaaacatctcgcccgtaagtttcctcttgaatcatgggaggaatttccggccttctttgaagaagcgggctggggaaccctcaccaacgtaagcgctaaaaaacaggagcttgaatttgaacttgaagggccgatcatttccaaccggcttaaacatcagaaagaaccttgctttcagctggaggctggttttatcgctgaacaaattcaattgatgaatgatcagattgccgaatcatatgaacaagtgaaaaagagagcggataaagtggttctgactgtgaaatgggatatgaaagacccagtgtaatcaaaaaggcggtgactgcatagtcccgcctttttgattgtcattacacagctgaagggtgttttgaaagctcaaatgcatcgtgaagcgactcgactgctttcaccatgtcattttcgcttacgactgttgacactttgatttcagatgtgctgaccattttgattaaaatgtttttttgcgccagtacagcaaacatttcagccgctacaccgggatttgagaccatgccggatccaacaatggatactttagccaatttgctttctgtctcgattttctcaaattccagcgcgtctttatactcttcaagcaccgcaacggtttggtctgcatcttctgttttgacagagaaggaaattccagtcttgtcctcggcctgcgtttggataatgatatccacgtttatgtttcttttggcaagtgtcgtaaaaatagtagacaaagttgtcaagccgctagtcagcccgtaaatggttactcttgtgatttgatcttcaaatgcaatgcctctgacaattaaattctgttccatggatgattcctcctcaattaatgttcccgcttcggtttctgtacttgaacgcacttctaacggcacttggtaatttttcgcgaactcaactgctctcggatgaagaacgccggcgcctaaattggcaagctcaagcatttcatcgtatgagatgcccgcaagttttctcgctgatttcacatagcgcggatcggttgtaaacacacctggcacgtctgtgtatatgtcacatttatcagcttttaaagcggcagccaaagcaactgctgttgtatctgaaccgccccggcccaatgtcgtaatttcacaatcctctgtcattccttggaagcctgcaacaatgacaatttttcctttttcaagctggtctgctaaaaccgaagtgtcgatatctgtaattctggcgtttccgtgaatggcctccgtacggattcccgcctgccagccagtataagacacagcgtcatagcctttttcctgcaatgccattgaaaggagtgaaatcgtgacctgctcgcctgtcgccagcagcatatccatttcgcgtttgctcggctggtcagaaatagcttttgcaaggctgaccaattcgtcagtggattttcccattgctgaaacgacgacaacgacttgatggcctttctgtttttctgcaattgcgcggtttgccgcattttgaattttttcgactgagccgacggaagtgcctccgaatttttgtacaataagacccatgtattaccaccctttacattttggttcgtgcgggtgaggagaaagagcgctttgtccacaataaaaaaagcaatgagaggaatactctcattgcttatcaattaatcatcataaatgattatgaacaacgagatagccctccaagaaaatgatttcttgacagccttacatttattcaatgcacggccagcaaataataccgatggggttttatttgcttcggcgacgctcccctttcagcctttttcacagaatccatctttctccaaaggcatactcttgaagttcgcacctctatcttcaccatataacacgatctaactatgaaattagttcacattttatcagatcttatttaaaaggacaacattatttttgcaatttgtcgtaaaggagctgagccgccgctgcgggaacaccggcttttttgatgtcctcaaggcttgcttccttcatttttttaacggaaccgaaatgctttaacagcattttctttcttttctctccgatacccgggatgtcgtccaaaacggattgaaacgcgctttttccgcggatttgcctgtgaaaactgattgcaaaacggtgcacctcgtcctgaatgcgctgcaggaggtaaaattcctggctgtttcgttccagatacaccacctccagcggatcaccgatcagtaaatttgaggttctgtgtttttcatctttcgctaaaccggcgatcgggatatccaagccgagttcattttcaatgacatcccttgctgcgttgatctgcccttttcctccgtcaatgataatcagatcgggcagcggcagattctcacgaagcactctcgtatagcgtcttctgacaacctctctcatagaaccgtaatcatccggccctgtaacagttttgattttatatttgcggtattcctttttgtatggtttgccatcgataaacacaatcatcgcggaaaccgggtttgtcccctgtatatttgagttatcaaacgcttcaattctgtgcggcgtataaatatttaatgcctcacctagtttctgcactgccccgattgaacgctcctcgtcccgttcgattaaagagaatttttctttcaatgcgattttcgcatttttatgggcaagcatgagcagttcttttttcgggccttttttcggctggtgaacgtttgtttccagcagctgctcgatcatagattgatctacgctgtccggaactaaaatctccttcggaaggaagtggttgttttttgaatagaactgcccgatgaacgtgaggaactcttcatctgcttcctgataaagcgggaacatgctgacatcgcgttcaatgagctttccttggcggatgaaaaagacctgcacgcacatccagcccttatcgtacgcgtacgcgaacacatcacggtcgactagatcgttcatcgtcattttttgtttttccatcgttgattcaatatgggccatttggtcacgaagctcttttgctcgttcaaactcaagattctcagcagcttcatgcattttctcttcaagctcttttttgacctcattatagccgccccttaagaaacgtgtaatgctttcaaccagctctctgttcgtctcttcggaaatatcctttacacacggagcgaggcattggcccagatgatagtaaaggcacactctgtccgggagcttggagcattttctgagaggatacagacggtcgagcagtttttttgtttcccttgctgcctgtacattcggatacggcccgaaatagcgccctttgtcttttttgacattgcgggtgacaatcagccttgggtggcgttcatgggtgagttttatgaaaggataggttttgtcgtctttgagcatgacgttgtatttcggatcatgctttttgatcagattcatttctaaaataagcgcttcaagattggaggacgtcacgatatattcaaaatcctcgatttccgtcacaagcctttgggttttcgcgtcgtgagaaccggtgaagtaggagcgcactctgtttttcagcacttttgctttccctacgtagatcacagtctgctgccggtccttcatgagataacaacccggttgatcaggaaggagggcgagtttttctttcagttgtttgttcatatgttacccttccttatgtttaatcctttatttccagtttaacacgaacgtttgtttttctctatggttcacaattggcgaataaaaaaagcgatccctcaatcggaatcgctctggcatgtaagcagcggaaaattaaagatgtttgtttacaagctcttgaagcgcttcttttggtttgaagccgactgaagtttcaactacttcgccgtcttttaacacaagaagagtcgggatgctcataacgccgtattttccggcagtttcttggttttcgtctacatcgatttttacgattttcagtttgtctcccatttcttgatccaattcttcaagaacaggtgcaatcattttacaaggtccgcaccaaggagcccagaagtctgccagtacgacgccttcgcttgtttcagctgagaaagattgatcagttgcttttacgatagccattattgaattcctccaatgtgaaatgatgatttttagtatagcatctcccattcgttcacgctattttaatgcttacaaattattttttcctgatcacagccggtttactcatttttatatggttgaatgggatatgctctttttttaaaacacaaatctgataatggccccaatcactacaattgccccaataatcattaaaatggtacgaagcataagatcacatctcctcttcactgtcatgtactttaccatgccctgccggagctgttttaaaacctgaaaaagagcgccggcatgaagctccggcgctcttgcgcgattaagaatcagcacgcagcgtaagcaagacgactgacattggcgggagttttactttcagtttgtttttgctgagcgtgtattgcctgaaggattccggtttgacatgatgaggatcgtcaaacgtgttatgcgcattcattttttctgccgtaagaatgactccggaatggtccgctgccttgtgtaggcccctcagctcgatttccgcctccgctttgttttggtgatcgatgttgcaaattgtgatattgatatcgccttcagtttgtttcgacgctgaaatgctgatttgcggaagcgtttcaccgttccattcatagtcggcagacattgtctctgtggctaaaagagaagcgtcctggtgcaccttaaacatattgaatacatggtacgtcggtgtcaaaagcatccgctctccctcagtcaaaatcatcgcttgaagaacatttactgtttgggcgatgttggccatttgcacccggcggcaatgctgatggaaaatgtggaaatgagaagccgccaccagtgcatcacgaatggtgttttgctgatataagaaaccgggattcgtgcctggctcgggatcaaaccacgtgccccattcatcaataatcagcccgacccgctgctccggatcgtaccggtccataatcgtgccgtgtttttgaatcaattcatcgatgtatttggcttttttcatcgtaataaaccattcatcttccgtgaattctgtggctgatcctttgcccttccagaaatcccccggaatcgtgtaataatgaagactcaacccgtccatcaggccagcggcttttttcataagcacgtccgtccaattaaaatcatccacatttgcgccgcctgcaattttataaatgtcattcccgctgtaattgcggacataagtctgaaaacgccggtacagatctgcgtagtattcgggatgcatgttgccgccgcagccccagttttcattgcccacgccgaaatatttcagcttccaaggctcttctcttccattttgctttctccagtctgacatcggcgtgccttcttcaaatgtcatatactcaatccactccgccatttcctgaacggttccgcttccgacattgccgcaaatatatggctcgcattcaagcagctcgcaaagcatcataaattcatgcgttccgaattcatttgattcaattgtaccgccccagtgagtgttcagcattgtcttacggtcaccgacaccgtttgcccaatggtattcgtccgcaaaacacccgcctggccacctgaggacagggatgtgcagctgtttgagcgcctccagcacgtcctttcgtatcccgttgatattggggatgtctgagtccgttccgacccagatcccctcataaatccctcttcctaaatgctcagcaaaatgaccgtatatatttttgttaattgttccttttacgatatctgtttgaatcactgcttgatgttcagacatgcctctgatcattcctttcatacggatatgaaaagcaccacagtcaaatatgtgatctgtcttttgcctgaggagtcagcatgaatgtaagcgcttttaaagtaaccatattatatatgttcgtacatgtcaacgacattttctattgtttttatatttgtacgtatgtatttataaatatgaaaaaatcccgaacttttaaagtccgggatttcctttatgagtgtatattcaattgtttgaattcctcagttaataacgggacaacttcaaataaatcaccgacgatgccgtaatccgctattttaaagatatcggcttcggggtctttattgatggcgacgatcaccttgctgtttgacatgccggccaaatgctggatggcgccggaaatgccgcatgcaatgtacaaatccggagtgacgactttcccggtctgcccgatttggagagcgtaatcgcaataatcagcgtcacatgccccgcgagaagccccgactgcggcccctagcacctctgcaagctcctgcagaggctgaaatccctccttgcttttgactcctcggccgcccgcaacgataatttttgcttcggagagatcaacgccgtcagctgtttttttcacgacctcttggataacagtgcggaggtcagtaagagaaacatcaatgcttttgatgctccccgatctgctggtgtctttttctgaagcttgaatgttattggggcgaattgttgcaaagatcatcggatcggttgaaatgacgcgttcaaaagctttccccgagtaaatcggccgtgtgaacacaacattccctccggtaacgcttacatctatagcatcagaaattaagcctgtttgcagccgggcagcaagcttcggtgaaagatccttgcccattgccgtatgcccgaagatgactgaatcaggattttcttgctcgataacacctctcatgacctggctgtacccgtctgccgtgtatgttttcagcttcgggtcctcagcggtaagaactttatctgctccgtaatgaataagctcttgtgcaatgctttgtacattttcaccgatgagaacaccgatgacttccccatctcctgaaatggttcttcctgcagctattgcttcaaaggtgacattccgcaattccccatcgcgtatttctccaagcacgatcactttttttcccattctaacatccccctgtttctttgaatgtccaagctttaaatgactttagcttcgctgcggagcaatgaaacaagctcttttgcctgttcagcaggctcaccttggagaagcttcccggcttcttttttcggcggcagaaaacgttcaatggttttcagctttggttcagcatcctcttcgtccaggtcaagatcatcaagttcaagctcttcaagcggctttttcttagccttcataattcccggaagcgatggatagcgcggctcgtttaagccctgctgagctgtgacaagcaatgggagcgtcgttttgattttttcaacatccccttcgacgtccctttctgcttctgcatcagtgccgttgatttcgagtttggtgatcgtagtgatacacggaatgtccagcagctcggcaagccgaggcgccacttgtcctgatcctccgtcaatggcaacatttccgccgagaatcaaatcaaactcctgatccttcatatagtggtataaaacttgagaaatggaatattggtcgggttcatcaagatcatcttctatgttgattaaaacagcttggtcacaacccatggcaagcgccgtacgcaattctttctccgcttcttcaccgccgaccgtgacagcggtgatcgtgccgccatgcttttccttcagctggatggcttcttctatcgcgtactcatcatatggattaatgatccattccgctccgtcatcctgaatctttcctgtttcaatgacgattttttcttctgtgtcaaacgtccgtttcatcagtacaaatagattcatgatcatatccccttttattcgcctttgaactgaggctttcttttttcgagaaatgcctggatgccttccttggcgtcctctgactcaaatgcttccccaaatcgctttgcttcaagctttaagctgccttcataggaatacaccttgttggaataaagaagttcaagcaaagatgccagcgtttgcgggcttttctctgcaaacttagcggcaagtgcttttgctttttcaatcacttctgcctcatctttcgctccaattgaaacaagtccgagatcaagcgcttcttttccggatatcggttctcctgatccgatgagctccagtgctttggctgtaccgacatatctcggaaggcgctgtgtccccgcaaaacctggaatgataccgagattaagctccgggagccccagcttagcatcttctgccgcgattctgatgtgacaggccattgcaagctccagcccgcctccgagagcagcgccgtgaatcgctgcgataatcggttttggaaaactttcgattctctccattaactgctggccgcgctcagcgagcaatgaggaatcctcattgcctttaagcgatgtaaattctttaatatcagcgccggctgagaaaaatcttccctcgccgtgaatgataatgcttcgtacgcctgcatctgtctcacattgatcaagacaggaagacagctcttctaatatccggcttgaaagcgcgtttgccggcggattgtgaatcgtcaagactgccacaaattgatcaaccgcaagtgaaattgcattcataggacagaactcctttacttattgtgaattccggataccaataattctaaaacgctgtttgaaagcgcaacgagatcgtacttttggtcattcatcacccaagttgtcacagtttcgtcaatcgttccaaaaatcatctgccgggcgaggcggacatcgaggccttcttttatttcgcctgattgtataccttccgtcaaaatgccatccaaaatatttaagtagccttttaatatttcgttgattttttggcgcagctccaagttggattggcggagctcaagctgcgtgacaatcgcgagattatggtcacccgctaaaagggaaaaatgctttgaaatcacaagcgccaatttctctttcgctgttgctttttctttaatgtcctcttccatccgctcaataaattgacccattttttctttgaaaagagaaattaaaatatcttctttgtttttaaaatagagatagatggtgccgtccgctactccggcttgtttggcaattttggatacctgtgactggtggtagccgttttctgcaatgacttctactgctgcatcaataatctgcatatactttggccgtttttgcttcaatgttcatcgttccttcctacagaaatgaatgactattcattcataatttcatgataagaaggattttcaggtttgtcaagtttattcataggcgttctctttttttatttgatatgatgattttcggtttcttcttcaagtaaacgccttcttaaaatttttcccaccgccgttttcggcagctcttttctgaactcataggctttgggcaccttatagggagctagtcgagatctcgcaaaggcatccagttcttctgcatcggcttttgcgcctttctttaatacgacaaatgcttttactgtttctcccctgtaggaatcgggaacgcctgcaacaacaatttcctggatggcttcatgttcataaagcgcttcttctacctcacgcgggtaaatattgtaaccgccggcaatgatgatatccttcttcctgtcagcaatatagaaaaagccttcttcatccatatagcccatgtccccggtgaacagccaaccatctctcagcactgcggcggtttcctctggtttattccagtatcctttcatgacttgcggaccttttacaatgatttctccatgctcatacggagcggcaagctcacccgtctcttcagaatagatcgcagcgtccgtactcggccaaggacagccgatactgcccggcttgttttttccccagataaagttggcgtgcgtcactggggatgcctcagacaaaccatagccttccacaagctttccgccagtcaccttttcaaatttctgctttacctccacggggagcgcggctgatccgctaagacagcttttaatggatgacagatcataatgctgcaattcggggtgatgcaaaaggccaatgtaaattgtcggtgcgccaggaaagagcgtcggtttgtgtttgtcgatgattttcagtgtttcgagcggatcaaacttaggaagaagaatcatttcgaagcctagtttaatcgaatagttcatgactgccgtcagtccgtagacatgaaaaaatggaacgatgcccagcactttttcagcgccttctttcacgtcatacatccaagcggcgcacatttcagtatttgccaaaatattttggtgcgtgagcatgaccccttttggagctccggttgttcctccggtatactggaggacagcgatatcatgctcaggatcgatcttcgggattgtcaggagttcagttttttcctgcttcatactggaagcgaacgtgtgaatgttagctgttttgtcaaagtcgatatgcactttttgtttttgcgtcagcgggtaaagaatattcttcggaaaaggcaaatagtcttttacgctggttatcaaaatctggtcaactattgatagcgttttcatttttattgccttcgggaaaagcaaatctaaggtgatgattacacttacctgagcatctctaagctggtattcaagctcatgctcggtataaagcggattcgtctgcaccacgatgccaccggcaaacaagacgccataataagaaatcactgtttgcgggcaattgggcagcataacagccactctgtctcctttttgcaggccattgcactgcaaaaaagctgcaagtttaagagcatccgtcagaatgtcatgaaaggtgagtttttttccataaaacgatattgcggttttatcagggaatcgtgcggcggagtctgtcaggatggattgcagggttttattcggcaacgggagctcatgcgggatatcgttgggatactcggcaagccacggcttttgagactgcataaaacctccccctttcgattttagagttccaccttatcattatagcagatggacggcaaaaaaaagaaaaagaaaggtaaatctttctttttctcataatatgaacagatatataagaccaattaacaaaaagattcccgccgcggcgagcagtacttttgcaagcttttccatttattctccgtccccttatattccggctgccaccacaaatgaaagcccgacagaaatgacaaatgaaataaagccgacagcccggttatcattttcgatttcctgatcaattttaaaccgcggagtcaaaaactcaaaaataaagtagctgatcagaagcataacaaacccgtaaacgccccagccgatcatttgcagcagcgaattatgctgggagatggaatgctgaaatacgtttgcgatccccaaaatttttccgccggtcgccattgccaccgcaagatttcctttttgaatctcttcccagtttttataagccgtcaccagctcaaacacagtcaaaaagaggacgaggcagagaaccgcgacactgtaatatgccgcgatttccacaagctcgttttcccaaaaatcactcatggccatactcccttttattttagttcaacaaccgtaacgcctgatcctccctcacctgcttcaccgaaacgggaacttttgacgctgcggtggtttttcagaagatcctgtacgccttttcttaaagcgccggttccttttccgtggatgattgacactcttggatatccggctaacaccgcatcatccaagtatttttcaacccggcttagggcattttcatagcgttcgccgcggagatcaagttcaagcgatacgtgatagtcctttcccttgaccgctgtaatgattttttctttttttggctccggagctgatttgataaactccagatctttttcttttactttcatctttaaaataccgatttggacattccattcattgccgcctgttttttcgagcaatgttcctttttgcccgaaagtgaggactttcacctcgtcgccaggcttaaagtcgcgtttttgcgctttcggcttctccggtttcttggacttttcaaaagccggcatagcgccttctaaccgtttcttcgcgttaatcagctcgtgatccttgaaggatttgtgttcttcttttatggagcgcaattcatgaataatgtcctcggcttctttcattgccgcttttactttttcagcagcctgctgttctgcctcttcaagcattttgtcttttttgctgttaagctcgatgatttgctgctgcagctctttatgcagtttttccgcttcttttctgattgattctgtctcagaaagctcttcttccgcacgttttttgctttgttccagcgacgcaatcatcgtatcgacttcgttatgctcggccgtcatttctgacttcgcctgcccgatgatatggtccggaagcccgaggcgttttgaaatttcgaaagcattgcttcgacccggcacaccaattaaaagtttataggtcggtgacagcgtttcgatgtcaaattcaacgctggcattcatgacgccttctctgttatagccgtacgccttcaattccggataatgcgtcgtagctaacactcgtgcattggtgcgatgcacgtcatccaagatgctcatggcgagggccgccccctcctgcggatctgtccctgcaccaagttcatcgaaaagcacaaggctgttttcattgacctgttctaaaatgccgacaatattcaccatatgggatgagaacgtacttaaactttgctcaatcgactgttcatcaccgatatcagcgaatacgtgctcaaatactgccgcttctgacccttcatctgccgggatatgaagacctgactgcgccattaaggttagcaggcctaacgttttaagggtgactgttttccccccggtgtttggccctgtgatgacaatggttgaaaaatcgcggccaagctcgatgtcattggcaacaacttgatcaggcggaagcaatggatggcgggcttttttcaaacggataaagccggtgtcgttcataatcggttttgtcgctttaaccgcttttgcatatctagcttttgcaaaaataaagtcaagcgtctgcagcacttgcaaatctagaaatagttcctctgtatactctgccgttttctctgtcagcacacgcaaaatccgttcaatttcttgcttttctttcactttcgcctgctgaagggaattgttcatatctacaatcgcctgcggttcaatgaatagtgtcgcaccagaggatgaggtgtcgtgcacaattcctccatagctggatctgtactcctgtttgaccgggatcacaaagcggtcattccgaatcgtaacaatcgtatcagacagcattttcgatgcggaagaggaacgcagcatcgactctaaccggtctctgactcttgattcgagtgttctgagctgtgtgcggattcctcttaatgtttccgatgcatgatcaagcacttctccgtgatcatcaatgcaggaattaatgtcccgctctaaatcggacagcgtgataagctgttcagcatgctgatggatcagcggaatgtcgacaccgtcttcagccatttgggtgataaaatgtttcatttgtttaactgcataaagcaggcctgagatttcagtgaattcagaaggactgagaacactgccgatttccgcccgtcttaacgctcctctgatatctacaaggccgccaaatggcgcttggcctctcagccggataatgtcagaagcttcgtctacttcatccagctgttttttgatttcgtctatagaagcagaaggcttaagctcgagaagcatttcttttccgagcgatgaagcggcatgcccaataacctgttctttcactttatgaaattcaagagctgataatactttttgctgcacgattgtgtgagcctccttacttaatcgttgcgcttcagaaatgcctctacgtctttaagcgaccgggcattcagaacgtttttcgtttccgtccatcctttgcgcgcggcagtaacgccagttttcatatcgtctaacatctcaatattatgggcatcagtattaatcaccaatgtaaccccttgttcgtttgctttcattaaatgctctgtgcgcagatcaaggcgcgcagggttggcgttgagttcaagcgccgtatttgttttcctcgcaagctcaatcagctgatcaatatcgatttcgtaaccggcccgtctgccgataaggcgcccggtcggatgtgcgataatgtcaacatgcttgtttgtcagtgccgtctcaagccgtttcataatcacgtgttccggctgattaaaactggaatgaatcgatgcaataacgatatccatttccgcaagcacatcgtcatcataatcgagcgtaccgtcaggcaggatatccatctcaacgcctttcaaaatacggaagttttcaaactctgcattcagcgcgtcaatttcttttgcctgctgcttaagtctttctgcagtaagcccgttggcgacctttaaatattgtgagtgatcggtgatcgccatgtattgatagccttttttgatgcaggcttcagccatctctctgatcgaaaatgcgccatcgctccacgttgagtgcatgtggagatcacctttgatttgcccgagctctatcagttcaatgctgtcgctgtaggtttccacttcctgtccgctttcacgaatttccggcggaatcagcggcaggccgaagtgcgcataaaattcacgttcactcggaaatgttttgatctctccggtttcaactgtctcaacgccgtattcactgatccgctcgccgcgttctttggcgatttggcgcatcttaatattgtgatcctttgatcccgtaaaatgatggagtgttgtcggaaactgctcttccgtcacaagacggaaatcgacgcttgtttcatattcaaaggaaaggatgacggacaccttcgtatctccgcttgcgattacgcttttgatgtttggcagctcaagaagctgctctcttacttcagccggatgatctgtagcaatgatataatccagatccttcaccgtttcccgcgctctgcggagacttccggcacgagaaaatttgatgatatgcgtaaattgagaaagatgctcctcaatttcccgcgcgatccggagggcgtatccgatcgggaaccgttcaggctgttttccggcttccccgagcgcctgtaatattttttcttccgattttttgccgaagcccgcaagaccctggaccttttgctgctcacaggcttccttcagagattctgcatcgtgtacgccgagctctttatacagctttgcgatttttttgccgccgagccccggcagcttcaataaaggcacgagtccttccggcacttctttctgaagcgattcgagcgtgcttgactttccttcatctatatactctttaatgacgctgtacgttccttttccaatgccggacagcgacatcatatcgtccatttctgataagcttcggtcgtcctgttccaaggctgccgccgcttttcggaaggcagatactttaaacgggttgtcccccttgagttccatatagactgcaatggtttcaagcagccggataatatcttttttatgcatatcataaccccagacgttcacatatgtttccatcatacttgaaaaaaacttctccggacaagagaagtttttttatgccccgtactgtgtccacagctcttgtaaaagccctgacaagtacggtgtatggttaatgatcacatttgcgagagacgattgtcccatcatttgctgcaacgcatctaccggcagaacggatgcgacatacagcagcacaaatgtaaataaatagacttctagaaaaccgagaacggctcccagcatctggttgatttgtttaatcaccggaatgccggctacaatactcaggaacgagccgatgattctcagtaagattttagcaatgataaataaaacgataaacgcaatcgcattatagtacgctgcttccaaattccccgtaaaaaaagaaagagccggctgtcccgctgaaaaatcgggtgcgggaatccaatgtaaatgcggtgccacgtttttatagaataaagccgcaaaggcaattgataaaataaagctcgtcaagcggataaactgcaggataaaaccgcgttttaaccccagtaaagtccccatcaggagcaagattaagatgatgatatcaagcatagttgttcaatccttttctttaagctgacgctccagtttttcacatttctcttgtaatttgacataatcgtgcaccacatttaccgctgtcagcactgcaagtttatttatatcaaggtatggatttttttcattgatttctctcattttatcatcaacaattccggcgacatacctcatatgggctctgctttcttcaccgacaatcgtgaagtgctggccgtaaatgtcaacggttgtttttgtttttttgccgtcagacaacgtttctcctccattccgcgagaatcctagttcttatcataacacgtttattaaatgaatggaaagacgagcctcccgctgttatgatacactggtatatacagcgaaaagtgtaaaaaaaggagattattacgtgtcccattcagtgataaaagtatcgttgtctgctattgaccaaatgaaaatgacgtacagcggttcacttacagcctctgttccgcagggagccgtttttcaggcaaaaccgcccggctgtaccattacagcatataaatcaggcaaggtcttgtttcaaggaaaaaacgctgcggcagaatccgcgcgctggggaacagcagagcctcaggaaaagaagaaaacggccaaaaagccggctgatccccgctatgcccctccggcagatatcgccggaatgtctgttatcggttctgacgaagtcggaaccggagattactttggcccaatgacggttgtatgcgcgtacgtcgacaaaaccatgcttcctttaatgaaggaactcggtgttaaggattctaaagatttaaaagatccgcaaatcatcgagattgcccgaaacctgatcaaaactattccatatagcctgctggttttaaaaaatgaaaagtataacagcatgcaggaaaaaggcatgagccaagggaaaatgaaagctttgctgcacaatcaggcgatcacacatttattaagaaaattggatggagtaaagcctgaagccattttgattgaccaattcgctgagccaggcgtctacttcaatcatttaaagggcagagacattgtgaaggagcggacctattttagcacaaaagctgaaggtattcacctggctgtcgctgctgcttcaatcattgcaagatattcatttttaatggaaatggataaactatcacgcgcggcaggaatgacgcttccaaaaggggccggtccgcacgtcgatgaagcggccgccaagctgatcctcaaaaaaggggcatctgcactcagaacctttacaaaactccatttcgccaatacgcaaaaagcgcagcgccttgctgataaaaaacgttcatagaaaaaagcttgcagatttctctgcaagcttttttctcagcctcttaaaacagcttgatatgtgtcttctaacgctttcagcactttgctgtgcgcctttgtcacttcttcttcagtcagtgtttgttcagggttgacatactggagtgagaaagcgactgacttcttgccttcctccatatgttcgccttcgtatacgtcaaagacggttacctctttcagaagcttgccgccagcctctttaatgacgctctcgagctgtccgcttgtaacggttttatctgttacaagggcgatatcacgtgtcacagacggatatttcggaatcgccgtgtaaacaagcggtgctgtttctgctgcgagcaacgcatgaagatcgagctcaaatacgtatgtttcctttatatccagttctttttccaatgaagggtggacttggccgatgaagccgatcagagaaccattcaataaaatgttcgctgttctgcccggatgcagctgtttgcgttcagactgtacaaattcaatgctgtctaggacgttgagtttgtctaacagcccttccacaattcctttgacaacaaagaaatcaactggtttcttttcaccctgccatagctgcttgcgccataatccggtaacagctcctgctacgcgttctgtttcaacaggttttgtgtcctcttccttcgttaggaaaacggagccaacttcgtacagtgcaactgagtcagtctgcctcgcaaggttgtaagaaacagaatcaagcagattcggaacaagactgtgtctgagaatgcttctttcttcactcattggaagcgcaagcacagtattcagtgatttttcaatcgcaaacgctgccgctttcttctcgtttgtcagtgagtaagtgatggcctgtgataagcctgcgccttcaaggaagcgtctgactttacggcgttttgcctgatatggcgttaatccgcctgtagttcccgctgtctcaggaagcgtagacggaatgttatcgtagccgtacagtcttgccgcttcttcaattaaatcctcttctattgtaatgtcgccgcggcgtgatgggacagtcacaacgagaagttcatccgcttcaccgaccgtaaaaccgagacgtttataaatgctgatcagttcttctttactgatcgtcaggcctagaacgctgctcactttgtcagcagatacgtgaatgttatttgcttcgattgtcaggtgatcttcctcaactgttccagcaagcacctcaccgccggcatacagatggatcatctgcgcagcccgttctgctgcaagacgtacgcgcgccggatcaattcctttttcaaatcttacgcttgattcacttctcaaaccaaggtctttggaagccttgcgaaccgtctgcccattgaaatacgcagcctcaagcaaaatcgttttcgtatcttcctgaacctctgactctgctcctcccatgacacccgcaacggcctgcgctttcgttccgtttgtaatgacaaggtgatcggcggacagcttacgttcttgatcatcaagagttacgatcatttcattctcagctgcttttcttactacgacttccttagagccaaatctgtcataatcaaacgcatgaagcggctgtccgtattccaacaggacaaaatttgtgatgtcaacgacgttgttgtgcggacgaatgcctgcattcatcagctttgtctgcatccaaagcggtgacggagcaatcgtgacatttttaatgatttttgcagtgtacagcgggttcgcttcttgatcttcaattttgactgaaatgtaatcagacgcttgttctgaagcagccgggtaatccgtttgcggaagctttacctcagtgtctaaaatcgcggcaacctcgtaagcaacaccaagcatgttcatggcatccgcgcggtttggcgttaaacccagctcaagaatcgcatcgtcaagctgtaaagccgctaaggcatcgcttcctgtttcagcgtcattagggaatacgaaaatgccttctgcatactccttcgccacaagtttgctttcgataccaagctcctgtaaggaacagatcatgccatttgattcttcaccgcgaagcttggcttttttgattttgaaattgcccggcagcaccgctccgactgttgcaactgcgactttttgtcccttatccacattcggcgcgccgcaaatgatttgtacaggggcttcagctccgatatccacaaggcacttattcagcttatcagcattcgggtgctgctcgcgctccagcacatggccgatgacaacacctttgatgccttctcctttgtattcaattccttcaacctcaataccggctcttgtaattttttcagcaagaacagccgggtccatgccttttaaatcaacataatcctctaaccatttataagaaacaaacatccttgcatcctcctcttacgcctgtttaaactgcgaaataaatctgacatcgtttgtatagaagtggcggatatcatcaatgccgtatttcagcatcgcgatgcgctcaacacccattccgaatgcgaagccctgatattccttcggatcaaagccagccattttaagcacgttcgggtgaaccattccggcaccgaggatttcaatccagcctgttcctttacatactgagcagccgttcccaccacatttaaagcatgtcacatccacttctactgaaggctcagtaaacgggaagaagcttgggcggagtctgatttcgcggtcttgtccgaacatttttttcgcaacaagttcaagcgttccttttaaatcactcatgctgatgtttttgtcaacgacaagcccttcaatttgcataaattggtgagagtgcgtcgcatcatcgttatcacggcgatatactttacccgggcaaatgattttaacgggacctttgccttcatgcttttccatcgtccgtgtttggacaggggaagtttgcgttctcatcaaagtctcctctgtgatgtaaaagctgtcctgcatatcgcgcgcagggtgttctttcggaagattgagcgattcgaagttgtaataatccgtttcaacctctggcccttcctcgactgtgtagcccataccgataaataaatcttcaatttcttcaatgacaacagtgagcggatggcggccgccgactgcaacagggttccccggcagcgtgacgtcaattgtctgtcctgcaagcttctgtttcatttcctcttcttcaagcttctcgtttttgtcagcaatcgcattggcaatacgctcccttacttcgttcgcgagcgcccccatttttggacgttcctcagcagaaagcttgcccattccgcgcagcacttctgtaatcggccctttttttccgagatattgcacccgaatatcattgacaatcttcaatgagcttgccgcttctacttgttctaaagcttcttgttccagctgttttagcttttcttccattttgcatcctccttttatgtaaacaaaccgtcatatgtctttggaaaataaaaaaaacccgtcccttttacaagggacgagttgtggccgcggtaccacccttatttcagacagactgatgctgtcgtcagcttcattgacataacggaatcagattccggttcacctttacgcgcagtgtacgcggtcccggcgacaactcaagaggtgaagccaatttccggctgcgttaaaaatgctctcagtcagcggcattttctccctggaaagcagttgatcagaaattgaggtcctctgtcacggtttttgaaatattatgttctattatagagaaatccaacgcttggcgcaacactatcctcgcaagtgatacacgaggatggcagccgcaaccgcaacgtttagtgattcagcctgtccgtaaagcggcacgtacaggttcaaatccgttttttccagcaatgcagcatccacccctgcaccttcatttcctacaatgagcgcaaaggattcagactgaggaatctcctggtaaggcgctccgttttgcagcgccgtgccgtatacttttacgccctctgccttcaattcgtccacatatgaaggcaggtttcttctcacaacaggaatatggaagtgagatccttgagcagatcgcagtgtttttccgttaaaggcgtccgccgtgccgtcaccgagtacaaccgcatccaaaccggccgcatcagccgttcgaatcattgtgccaaggtttcccggatcttgaacagcgtcaatcagcagcaccttgcgtgccgttgccagcttttcttcaggcatatggcacacagcggcaatctgctgcggcgtttcggtttcagtcacagctgaaaacgcatcttcactcagcatatagcactggataccagtctcaagatctgaaggaatcttcgtttcatcctttacaaggatttctttcacaatgcccgggcttttcaacgcctcttcaacgaggtgttctccctctatcagaaatgtatttgtttttgttcgttctttttttgtgtgaagctttttccaatccttcactttttggttttttgccgattctatttgtttcactgtctatgtggcgctcctttttttaacatgatgttattatatcgcaagaacagcacataataaaccaggtgcagggttagaatatacgtattacattttagaaaaaggagcgttttacatggatcttaatttacgtcatgccgtcatctccaatgtcaccggcaataatcaggagcagcttgagcatacaatcgtagatgcgattcaaagcggtgaagaaaaaatgcttccagggctcggcgttttattcgaagtcatttggcagcacgcatccgaaagtgagaaaaacgaaatgctgaaaacgcttgaaggcggattaaaacccgccgaataagacatgaaaccgggtgacagcgcccggtttttttcttatataataaaaacatgatgagggggaacgccatgtttttacagccgttattagcgaaaaaaattattgctgaagtaaaaaaaatgtacgaacgtgaagtcattattgtaaacacggacggtcttattatggcaggcacaaacgatgaacgtgtcggacaatttcatgagggagcgcttatctgcgcaaaagaaagacgcagcgtgattattacaaaagaagatgaaacaagattaaaaggagtgaaagcaggcataaacctccctgtattttttgaccatgatgtgatcgccgtcttcgggctgacaggtgagcctgcagagattcagccattcggagaactgcttcgaaaaatgacagagctgttcattaaggaatcacggcatttagagcaatcccagtggcgtgagagaatgctggagtcctttatgatcgattggctgcaactaaaggagtggtctcccagttttcttgagaaagctcagcttcttggtgttaacctttcctcccggcgccaaatgattcttattcaggggtatgagtggtcacgtcatgatattgaacaaatggcacgcagctggaaatcctcgtaccctgcggatttgttcatcaggtggggaaatgaacggatcttgattaatcatgaagtgccgcagcatgaacaaagggatcggcttttacggaagatccttcacatttgttcgtttgccaataccgcaaacagccaatttgcagcagctggcgccggaagggctgtcgcaagctccagcctgacagattcatacgagcaagcggaaaaagcgctggctgtcagccttaagcgaaaaacgcccatatttgaagaggatctgaagcttgatatgtgtctgacggagatcagcccgggaacccgaaacgaatttccgcaaagagtattaggagaggcgctagagcatcaggaacttatgaatacgttacggactttctttcatcacgatttgtctttgaaacaaaccgcagaagatatgcatattcatatcaatacattgcgttatcgtctggctaaggctgaacagctgacgggtttacgttttgaccgtaccgaggacgtcgtcacgatgtacgtcgcactctattttttagatcaagatacaaaatagagagagtttcagtttcattttttgtatgtttctccatggaaggctttgctttttttcttttacaatagattgaaagcattttttgacagggggatgggtgaaatgatcaccaaggatgtaaaggaacagctgattcaggtctccggaccagaaaactttgatgactcgaatgccggccgtctcgtctattcatatgatgcgacgcctcagtatcagtctatgcctgatgccgtgattgctccgaggaatactgatgaagtatcacgcattttaacaatttgcagcgaacatcgagtgccgatcgttccaagaggatcagggacaaacctgtgcggcggcacgtgcccgactgaaggcggacttgtgcttctctttaagcacatgaaccagattcttgaaattgatgaagaaaatttaactgccacagttcagccgggcgtcattacgctggatatgatccgcgcggttgaaagcaaaggtttgttttatccgcctgacccgagttctatgaaaatatcaaccatgggcggaaacatcaatgaaaattccggcgggctccgcggattaaaatacggcgtcacccgcgactatgttattggactggaggttgtgctcgcaaatggtgacatcatccgcaccgggggaaaactcgcaaaggatgtggccggatacgatctcacacgtctttttgtcggctcagaaggaacactcggcattgtgaccgaagccatcgtcaaacttgttccaaagccggaaacaaagaagacgttgcttgctctttatgaaaacatcgatgccgctgctcaaacggtatcggacattattgccgcaaaaattatacccgccacgcttgaatttctcgaccagcctacacttttggtgattgaggattatgccaaaatcggacttccgacaagcgcaaaagcagttctgttaattgaacaagacgggccatttgaaactgttgaacgggatatggaaaagattgaggcgatctgcaaaaaaggcgacgccgtttccgttcagaccgcacaaacagaggaggaagcgtttgccctgactgaagcccggcgttctgcactttctgccctagcccgcctcaaaccgacgacgattttagaggatgcgaccgttcctcgctcagaaatcgccaatatggttaaagcgattaatgatattgctgctaaatatgatatttccatctgcacctttggtcatgcgggagacgggaaccttcacccgacatgcacgacagacataagaaataaggatgaaatggaacgtgtcgaacaggcttttgccgagatttttgagaaagcgattgaacttggcgggacgataaccggagagcacggagtcggggaaatgaaagcgccttacttggaaatgaagctgaaaaaagaaggcattgatgcgatgaaagcgttgaaagcggcatttgacccccggaacatattaaatcccggcaaaatgtttgcgaaagatgccagaaaacgtgtggtggcggaaagatgacaacagaaaaagaaatgaaacagatccaaaatgaatttaaagagcgtatggatgaaggagagttattaaattgtatgcgctgcggcttctgtcttccttcctgtccgacctatatcgaatcgggatttcaggaaacacactctccgcgtgggcgcatcgccttaatgaaagccgtagccgacggtatgattgaaccggatgaagatgtcgaacggtcgctgtcactttgcctcggctgccgcgcctgtgagcctgtatgcccgtctggcgtgaaatacgggcagctgcttgaggaagccagagatattatccaccaaaataaaaaacactctcttggtgaacgtgtcatgcgaaagacggcttttcacgagctgtttccgcatcaaaaccgcatgcgctcagctgtaagccttatcggtttgtatcagcgttcaggactgcaaaccgctgtgcgaaaatcaggcatgcttcggatcctgcctgagcatttgcggacgatggaagctgttcttcctgatgttccaaaaagcaaagacatgaaacatcggccgcgtttcctgccgtccattggccccatgaaaaaacgggtcgcctttttttcgggctgcttaatggatacgatgtttttaccgactaacaatgccacattgaagcttttacagctggcaggctgcgacattgtcatcccgcctgaacaggcttgctgcggggcgcttcatggacacagcggtgaaaaaaacacagggaaagagctcgcgaaacaaaatatcgctgctttcgaagcattagacgtggatgcagtcattacaaacgcaggaggatgcggagcctttctgaccgaatatgatcatttgctgaaggatgacccggaatggtcggagcgggccgccgcttttgttcaaaagctaaaggatttttcttccgttttggttgaacttgatttccatcaaatggacttagcgctcgagacgcctcaggtcgttacctaccaagattcatgccaccttagaaatgtaatgcatacgtcgcttgagccccgccagcttcttaaaagcatcaaaggggctgaattcaaagaaatggagaaagcagacagctgctgcgggtcagcgggaatttacaacatcgtcgaagctgaaatgtctatgagaatactggacagcaaaatggctgccgttaaagcaaccgaagcgattctcattgtaacagcaaatcccggctgcctgctgcagatgaagctcggcattgaacgcgaaggactaagcggtaaagtcagagccgttcacctggctgatttgctattggaagcagccgggcacaaaacatcatgagaaagcccaaaacagatattgttttgggcttttgtgcgttattccatcggactgcaaatttcgatataatgtccatccggatcagcgatataggcgaccgtctgcccccatggtttcactttcggctccccgataatcgatacgccttgttctctcatccttttgatgaccgcttctacattttcagtaacaaacccgatttcaaatgtgtttgaagcagatgtatccggaatgtccagcgccgtgatgtctctggcgctttcccgcgtattaagcgccaatatcgtagaccctgtttcaaattcgacatacgtgccgtgttcagcacgaatcggcagtcctaaaatatcccggtaaaaatgaatagcccgctggctgtccgatacgtatagaataagatatttcattgatagattcattgccaacccccctcagcatttttcaatagtccttctagcccggtatagatgcttccatccttaagctcggatctttccacatctgcgcccattttttcacagccgccacgataatgatgaagcctaacaccagcatgatgatagataatacgccattcaatacactatatcctgctgcttcaggattgagatacacattgcgcaccatccaatagcccgcataattgacagtgacatataaataggcaagcgggataaggcaagtcagaatgtaccggcgtttatcagcgattttcagcacgatcgtcgctccgataatcagccccactgaagccatcagctgattagaaacgccgaacagcgcccaaatggaaccgatatctcctgaatacagcaagtacccccacatcaaacaggcaagcgcgctggcaaatacagagcccggaatccagtctgttttcttcagcggtttatacacctccccgaagaaatcctggatcaaataacgggcaacgcgtgtgccggcgtcaatcgctgttaaaataaagaccgcttcaaacataatgacaaattggaaaaagtatgaggccaaatggctgaaaaacggcattccggtaaaaatataagtcatccccaccgcaagcgtgacggctccccctgttcttccttctaagtccaaaccgatttccccgctcaattcaggcaaatgtacgacattcatgccaagcgtacggaaaacctcaggcgtgctgttaatcgcaaagtaatcagcaggctgtaaagcggtcgctgcaatcagcgccatgatgccgacaagacactcaacaagcattgcgccaaacgcaaccggcttcatatcactccatttattcagcattttcggtgtcgttcctgagccgacaaaggcatggaacccagagatcgccccgcaggcgatggttattgagatgaacggccagacaggtcctgccagcaccggcccgccgccttttacgaattctgtaaacgcaggaaacggaatagacggattgacgacaaacacaccaacaatcaaagcgataaaaacaccgattttcataaagctgcttaaataatcacgcggtgcaagaagcagccaaacgggaagcgcagccgcaaaaaacgcataaacaggaagcgcgattgcaagcgttttcgtatctagcgttaaaaagtcaccgagcgcggtagtctgtacccatggaccaataaagactcctgccattaaaaagagaaagccgaccgttgaagcgagctttaaatttcccgttttcttataaaataagcccacacccatcgcaatcggaatcgtaatccctaccgcaaatgttccccatggattacgttcaagcgcatgcaagacaaccatcgacaggcccgccattgtgatcgtgatgataaacagcatggacagtcctgtacaaaatcctgcaacagggccaagctcatccttcgccacttccgacagcgattttccgtttttgcgcatcgatgcaaacaacaccacaatatcatggacggctcccccaattaccgccccgattaacagccacaataatcccggcaaatagccaaactgcgccgccagaattggtccgaccagcggcccggccgctgcgatcgcggcaaagtggtggccgaacgaaacccatttatttgtaggcacatagtctttcccatcctcaagcgcatgagcaggtgttggcttgtcatcattcactttgagaaccttcaccatcataaatgttccgtataaacgataggcaatagccaaaatacacattgatgctatcacaattgtaaccgcattcattttctcccatcccctttgctgtttttcataaatatatcacaatttcatggtgaaaagcggtcattttttcctatacaaaaagccggcttgaacgggccggctcgtggcagttgaaagacaagccggagatttctctccggctttgctattcttatgactgttttttcaggcggatcacattccaggaaagcggcgtgaaatgagcagttaagccgttttcgctgacagacgatgatccgttggaatgcggaacgacattttttctgttatgctggtttgtcgctttgatatcctgatgctcaagtacgatgtgctctgcgatttggtaagattcaaagcctctgagcgaaatctccgtctccatctgatcctcagccttgtttaccgcaaaaatagtgagggtttcttcctcttcagagtacacaacagcagcatcaacatatggcacatcagtgaaatcagaacaatcgtacttaggagaagaaataagcggtttcagtgactcgccccttccgtaaacagaagcatgcatgtatggatagaaaatcggctgtctccatgcttctccgcctttttccgtcatgatcggcgcgatgacattgacaagctgtgcaagacacgcaattttcacacggtctgcgtgctgcagcatcgtaatgagcagagagccgactaataaggcatcttcaaaattgtaaatatcctctaaaatcggacgcgcagtgatccacggctcgacttttttatcagcctcatttgagtggtaccatacgttccattcatccagagagagattgatagttttcttgctgcgtgtttttgcttttacatagtcacaggtcgcagcgactgatttgataaaatgatccaaatccatggaacgggccaagtagtttggcagattgttatcccggtttccgtagtaggtgtgaagagagatatagtcgacatgctcatacgtatgctccagcaccttcgcttcccaatcgataaaggtcggcatgccgctgtttgagctgccgcaggcaacgagttcaattgatggatcaacccatttcatgacctttgccgtctctgcggctagccgtccgtattcatcagctgttttgtggccgatctgccacggtccatccatttcgtttcctaagcaccatgttttaatgccgtacggctgttcatagccatgcgatcttcttaaatcactccagtaagagcctttcgggtggttgcagtattcaacgagattacgggcggcatctatgcctcttgtgccgaggttgacggccatattgacctcagtgttcacctttttggcccaagataaaaattcatttgttcccacttcattggtttctgtcgtttgccatgccaagtcaagccttctcgggcggttttcgactggtccgacaccgtcctcccagttgtatccggataaaaagtttccgcccggatagcggatgatgggaacctgtaattctttgatcagcgactgaacatcttttctaaacccatcttcatccgcttcagggtgatcaggctcgtatatgccttcatataccgcacgacccatatgttcgataaacgagccataaatccgtttatctacttcaccgattttatattctttgtctacaatcattcgcgcttttttcatcacacgtttcctccttcattaacctttgactccccctaccgtcaggccggagataaagtacttttggaaaaacaagaaaatgataatcaccggcaaaatcgcaaatactgagccggatataagcatgtcgtaattatttccataagggctcagcaagctggacagccctattggaagcgtaaacatttctttcgaccgaagcacaatcagcggccacaagaagttgttccagctgtttaaggactgaaggataatcatcgcaccgaaagccggtttcatcagcggtgccataatcctgaaaaagatgccgaattccgtacagccgtccatccttgcagagtccagcagatctcttggaaggccaagagcatattgcctaaaaaagaaaacggcaacaggtgaaacgataaacggcaatatgacacctgtatatgaatcgatcaagtgcagtccgacggtaagcttaaacagaggaagcatcatcacttccagcggaaccatcatgataatcagcacaagaacaaagatgatatttctgcccttaaaatcataaaccgcaagcccgtacccgatcatcgaagaaaaaaacagggtgagcacggttgtgaaaagcccaagtacaagactgttaaaaaaccatttgaaataaatgcttccgccgttaaacagaaatgtataattatcaagactcattactttaggatcaatgtcgagattgagccccacacgcaaaagctcagatgacggctttaatgatcctaaaagcaaacagaaaatcggaaaaagatacaataggctcagcatcataaaaaacagggttagtgcgattctgtaaacgctgaactgaggactgtgccgcaacatttatccctcccccttaaacgagcctgacagctttaatgaaatcaggctgacaacaaggatcacaatcaaaagcacgatgccgatggctgctccgtaccccatttcgttgtaggcaagcccctgctgatacaaatatccgacaagcgtcagaccaatattacccggggaattattctgccaaaggacgtagctttcctcaaacatcctgaagccgccgatgatgctgatggtcagcacatatacggttacaggcttgagaaacggcagcgtgatgtgcagaaattttttcattgtattcgcgccgtctatatcagcggcttcgtacagctctttcggcacattttgcaaaccggctaaaaagtaaaggatgttgattcccatccatctccatgaagcaagcagcaccatcaaaaacatgccggtatgttcattgttcatccagttctgaggtgaaaagccgagtttgagtaggatggaattggccagagacgtttccatttctccgaagatcagccgaaaaatgatccccgcgacaatggttgaggtcaatgccgggataaataatgctgatttaaatatatttctaaatttgaccagctttgaattcaggaatatggccagaagcaatggaacaggaatcagcacgatcagcgtccaaaaggtgtattccagcgtattccaaagggcggtatagaacgtcgggttgtttagcgctgtataattagacaatccgacaaaggacacctctcccggcaaaattctttggaagctcatgatgaagacactaatgatggggtatagaaaaaatacgagaaaggataaaacgaatggcgctgtaaacagatagggcgccgctttttttgaataaaacagatctcgccagcctgattgtttcgcagctgaaggaacgggatgaaccgttcctgttttcacaggtttcatgagaacctccccgctttcactttttgaatgggattctatttctgtttcagttcacctgccgctctgtccaaggcttgtttaggcgttttttgctgagatttaagtgcgtcgaacaacacgcttctgttgacaaggtctgaagccttggcaaaatcctcatgtaaataaatcggattgatttcatccttgatatcgagcagcacagaaaaaatgcctgttccgttttggaagtaatccgtgtatttgtttttctctttcaattccttggagctccaaacatcccagcgaagcgggtcaaagccgagtacgctccagagttttttatttccttcttcagagcccttcgcaaaggccaaaaactcttttgctaactcaacatgcttggattgcttcggcacaacggttgccgtaccgcccaagcctgccgagcggtcgcccccctctttccatgccgggagcggcctgatggcaatcttccctttcagatcaggcatataatcgataaatcttcccatataccaaatcggcatgaggactgaagcagctcctccttggttcataaagccgtagtattcttcactgtgatgcccgccgcccggcgcaggaatcatcgttttatcattgatcatgtcttttaaatattgaagtgtttttacgttggtgtcattattgaggatcagcttgccgtttttatcaaaatagcctgagttttgctgtgaaatcatagataagaacgttgcggaatcatttgtttccaccgttcccatcggcttcccggtcactttgcgcactttctgtccggctttatggtaatcatcccatgttttaatatcgtcaggattgacgccggcttttttcatcacatccatgttataaaacatgaccgttgttcctacatgcgtatcgagtccgtaaagcttgccgtttttgctgtacagggtcagccgcgcctcaacgaatttatcgcggtccttttcaatcagcggagtcaagtcggcaagcggtatgtcagagcccttcaaaaagtttgaaaaacgggccaattcgacatcggcaatatcagggacgccttctcctgcaattaaggagatagacaagttatcgtgcatttgtccatacggataaacgaccgtattcagcttaattttgcggtcaggatatttttcattccattccttcaccatttctacatagaactgctcatgaagtccgttaaatgtccaaaaggtcagctcggtttcacccgacttcccggatgatctttctgctgaacacccagcaatgactaatgtcaatgtcagcaacatcatgagcacaagaaaacagacagtcatttttttcatctgcgttaccccttccattcgaggtgcgggctattcatatagaccatggttgatcagcgttttgttttcattgatgattcttaatccggtgcagcggtctcttaaggtgtgcgcgtgtctgaaggcattcttgacggaatcctgcccgacaccgatttcgtcaaaatacgcagggcctccggctgatctcagccaatcagccagcacttctccttccgggagagtttgataagccgattggatggcttgccgccggctcggtgaaaattcgttcagcccgtcatccttagcgagctttctgtatgtgtcagttaataaaacagctgcacagcccacctttgccccatgaagaatctgtggccgttttttctccattaattccatctcaatccaatgtgaaatatgatgctcgccgcctgatgccggtcgggaatgatctaatgccagcatgacaagccccgatacaagtaaagactccatcaaaacccgtatgccagtttccgttttcatcgcaatgtcttctgtgtgttcaatgcaggcagcaagcgcctcctgaacaatcttagctcctgctggcgaataaggctcgccggcaagatgccgggatatttcccaatctgctaaagacgttattttaccgagcatgtcaccaaagccagctgccaccattgactgcggtgccgcttttaatagatccagatcagcgaacagtgcagatggggccttcgtttgaatggttgttttcgtgccatataaaataatcggcgcaccggctgatgtaaaaccgtctacagatggagcagtcggataagaaataaacggcaaatctctttgaaacgccgcaaagcggacgatatcatgaatcgtgcccgaaccgactgcgatcatgacatccgttggttgtttcgtatggatcagcacatgaatgagcgatcgttcatcagctgtcacatctccggcttcattttctggaatgatcaggcactcggcctgaaatccttcttgattcagctgattttccagatcaattcctgcaatgcggtgtgtattcgcatcgcagacaaggacaatatgtttattgtttttttgttttacgtaattcaaaagcgaatcagctgcttgtttaccgagaacaatttcttcaacttttataggcaacgtcttttctccggcgtgttcaaaagcacgctgaacgtcagctgcgatacgattcatatcagaatcccctcctcagccaatttggttacatccttaatagaatccagcacataatccggcgtgtacaaacgctgttcgccctgtttcgcagaaccagttagcactaaggcgcttttcatgccataaagcttccccatcgcaatgtcagattcaatgctgtctcctataatcatgcattcatgtgcggacagccccattgctgtacaggcagcctccgccatcagccatgacggttttccgacaacaagttcagtcttcgcttgtgcggaagcctctatcgccccaatcattccagccacatcaatggcatttccgtcttcgttcggaaaagagcggtctttgtttgtagcgataatacgagcgccgccggcagccgcttgaaaggcttgatttaaatcgtcgtacgtgagcgtttcatgaagggagatcacgagccaatccgcttccttcggttcgttcgcgttctgcacaccggccagcctcagctcgtcaaccaagccttgttccccaagcacccatacctttgaaaaacgataatgttttttcagaaaagccgctgtcacgcttgatgacagaacaatgtcgtttacgtccgtttcaatccccgcgccaagaagtttttttctgcacatggcacgggagatattcccccggttgcttaaaaagacgattttctttcccattctcctaagcgttttgatcgcttctcttgctccttcgatcaactcatttcctctgaatacagtaccgtccaagtcaatcagaatgccagccggtgacacaggcgtatcatgactggccataatacgcatttgctccgtgttttcgataaaaatgcttttcatgcaggactgtattgattggggttacatccttgttcagcataatggagtgataggccatttcggcaaccgtttctaatacaactgcgttatgaatggcatttaaggcgtcagtgccccagcagaacggtccgtgattattcacgagcacacccggcacctgttcgtagttatgatgctgaaaggtttccgctatgacttttcctgtattcagttcgtagtcatgaatgatttcttcatcgtacatttcacgagtacatggaatcgcactgtcaaaataatcagcatgggtcgtgcctaacggagggatgtctctgcccgattgtgcccagcttgtcgcccattgagaatgggtatggacaattcccccgatattcggaaaggctttatataaataaacatgggtaggtgtatctgaagaaggcttaagcgagccttcgacgacctctccatcaaggttcaaaacaaccaagtcatcggctgtcaggtcgctgtattcgactccgctaggtttgatgacaattctttctttttcacggtcaatgccgctgacatttccccacgtaaaggttaccagctgatgctcttgaagcttcaggttggcagccagcacttctttttttaatgtttcaagcatgctccatcaccctttatcaattctttttggcggcagatgaaaattgaagatttttgatcgttttcagacgtttcatgacatggttttcttttccgaaataatgaaccagctctttatattcagcgtacaatttttcataaaccgcggcgttttcggcatttggcgtataagttatatctttcagttttcccatgttcgccgctgcctctttgatgtcatcgtagccgcctttttctttgcctgctgcaagcgcgccgaaaatggcagatcctaaggctggtgcttgcggtgaaccagagattttaatgtccatgtttgtcacatccgcataaatctgcatgacaaacgggtttttctcagctattccgccggctgcgtatagttcctcaatcggaacaccgctttctttgaatgtttcgataatcattcgggttccgtaagctgtcgcttcaactaacgctctataaatctcttcaggcttcgtcagcagtgtcatgccaagcagcatccctgttaaatctgcatcaacaagagttgaacggtttccattccaccaatctaaagcaagcaagccgctttcaccaggcgcttgatggtttgctttctcactcagcagctcatgaacgccaatgtttttttcctttgcttcctcttgataagctggcgggacacatgttttcacaaaccagtcaaaatgatcgccgacacaggactgcccggcttcatatcccgcatagcccgggagaattccgttgtccacaacgccgcacattcctggaacgatatgcacctcttcaccaagtagaacatggcacgtcgaggttcccataatcatcagcattttccctggctctgtaatgccgaccgccggtacggaaacatgagcgtccacattggcaaccgcaacagccgttcccgggagaagtccggtcagctttgccattttttcagtcagactgccggctttttctcctactgaatgaatagaacctgacaatttgtcttttgtaatcgttttcattgaaggatttaatttctcaaagaaatcatctgacggataccccgctttttcactccacatcgctttataccctgcggtacaattgcttcgcttgagcgagccgcacagctggtacacgatccagtccgcagcctcgatgatccggtcagccgcttcataaatgtgaggcgcttcctcggcaatttgcatgacctttggaatcatccattctgatgaaatttttcctccgtaccgctgtaaaaaagcctctccttcttcttccgcgatttgattgagccgatcagcatgtttttgggccgcatgatgcttccagagcttcacatagctgtgcggctcctcttcatattcaggcagcatgcataacggctgcccgctgctgtcaataggaaggatcgtacatgccgtgaaatcaattccaatcccgataatgtctttcggttcaacgcccgtctgttcgagtaaagacggaatggttgtttccaagacttcgaggtaatcagcagggtgctgcagcgcccagtcgcgcggcagcttttgacccgtttttggaaggacggtatcaatgacagcatgcctgtattcttttacagcagccgcaagttcctcccctgtttggacatgaacgagcaccgctcttcctgataaagttccaaaatcaacccctattgtgtaagccatgtgacatccccctctacttttgaagccggtaaagcgcctcgttccattttaactcgtgtttcagtttatgaattgtcgtatcacgggaaatgagaacactttcgatccccgccatttccgcccaatcaagcatttgctccgctgtcagttcataagacaggcaggtatgatgtgcaccgccggctaaaatccatgcctccgctgctgttttcaatgacggctccggcttccagagaacacgggcaaccggtaaattcggcatgtctttttcaatttcctggccggtgacttcattcagcacaaggcggaaacgcccgccaatatcaacaatgctagcttgaatggcagaacccctgatgccgttaaatacaaaacgcgcagggtcctctttgccgccaatcgaaagcggatgaacctcgattttcggctgatccaaagcgacagtcggacacacttcaagcatgtgagagcccagaatcatttcatttcccggttcaaaatggtacgtgtaatcttccatgaaggaagttctttttcctttagccatgattttcatcatccgtacaagggccgctgtcttccaatctccttcaccggcaaacccatagcctttctccatcaggcgctgaacggcaagtcccggcagctgtttcattccgtgcagcacttcaaacgatgtcgtaaacgctgtgtatccgccttgctcaagaaaagcggttaagccaagttcaattttcgcctgttctttaatggacgctacctttgcttcgtcacgttttgtttcctcactgatcacatatagtctgtcatactcggcataaagcgtgtcaacctcgtcgtccgtaatgcggtccatcacttcaacgagatccccgatgccatatccgtcaacctgccagccaaattgaatatgcgctcccaccttgtctccgtccgttaccgcgacatgacgcatgttatctccaaatctggcaaccttaatatgtctgctttcatttaatgcagccgccgtatccatccactgggacatttcttttttcacttcttcatcatcccaatagccggcaatgacttttcggctaagccccattctcgagttgatgtaaccgtactctcgatcgccatgcgcggattggttgctgttcataaaatccatgtcaatcgtaccccacgggatatcgcgattatattgggtatgcaaatgcataagcggtttttgataagaggaaaggccttctatccacatttttgcaggggaaaatgtgtgcatccatgtaatgatgccagcacatgtctcactgtactccgcttctcttaacagccctctaatggtttccggtgaagtgacgacgggcttatgagtgattttatatctggaagaaatcccgctgagcccctcacaaatgcttttagcatgctgatctacgagttccagcgtctcttccccgtataggtgctggcttcctgtcacaaaccagaattcataatcctttgtctgaagcatgtaaactgcccctttctcataaaataaaacgctttcaaatacaaaagatacgtactaatgatagaaaataaacctataaataaatatttgtacgaacaattttattatagtaattgactattatactgtcaatcttttctttttaaaaaagccgggggcagagcccggctttttgattcaataggacggccagcccgagctccaattcaaatcattgatgagaagctttggaatgccgttgtcattggcatcataggcatggcgaacaagaatgtttccgttcacaatatcctggcctccaggtcctttccattggtcattgcccgaatccaaaatggtgcctccgccttcaagcatgctttttccgcttttatcaagataagggcctgtaatgtttttggatcttccgtaagcaattttgtacgtactgtttaccccgtcacagcatttatcaaatgaaaccattaaatagtaatagccattttgatacgtaagagtaggagcttctaaggcacccccattattcggtctagctgcaatcgaatagagcgagcctgtaggcttcatcgtactcttatcgagcttagtcagcttaatgccgctccaaaacgagccgaatgcaagccacggattgccatccttgtcgaatgtcagctccgggtcaatggcgttataattatttgagcttgtcgaacgaatcaccaagccctcgtccttccagctccccgaactgatgcttgttgaagatgccaggccaatggcagatgtattgcttccaaaagaagaaacggaataatatagccagtacttgccgttatagtattggatgtccggcgcccactggttttgaccataattcggcacataattggaccaccacgatagcggtgtagtgaaaatggatttttgtacggtccaatttttagcgtctgaagacttcaaaacccgcagtccccgttcttcagtaagccctgttccaagcgcataccatgagctcccctctttaatcatagtcgggtcatgaagcagctcattggatgcaccccaaaacgctgcctctgcgggagcagcagaagtgaatatcaaacctgcagccagagctgcactcgaaaagtgtaagaagcgtttccatgtttttttctttttcaattttgtttaacctcctttatattagaaagcgcttacaaattagattgtttatcctcccttcctgtcaaatcgagctgcgtatcgtatatcgtcatgttcaggaaattttcggtatcccctttattgtagtcactatgctgtaatttgtacagacaaaaaaatagaatccgcctaaataggcggattcttccgtatctttattggtacgtaatttcgtcaaccgtttttcggtctaacttcttaatgacttccgtaattaactttaccgcgttttcataatcatcacgatgcagcatggccgcgtgcgtatgaatgtagcgggttgcaatggtaatggacagcgcaggaacgccattcgccgtcaaatggatggcaccagaatcagttccgccgccggcaatggcatcaaattggtacggaatgccggcttcctccgcagtggctacaactgcatcgcgcaaacctttgtgagagaccatggatgcatcgtaaacgataatctgcgggcctttgcccattttgctctgcgcttctttctcggaaatgccaggcgtgtctcctgctatccctacatcaacaccaaacgcaatatcaggctgaatggtgtgtgcagccgttttcgctcccctcaggccgacttcctcctgcacggttccgacgccatacactatatttggatgatctgtgttttgtaagtttcttaacacatcaattgcaatcgcacagccaatgcggttgtcccacgcctttgcgagtaggaatttttcattgttcatgaccgtaaattcaaaatgcggaacgatcatatctcccgggagtacaccccactccaaggcttcttcccggcttgaagctccaatatcaataaacatgtcttttatttccactgatttttttcttgcttcaggagataaaatatgcggcggcttagagccgataaccccagtgatttctcctttaattgtgacaacggtgacgcgctgggcaagcataacctgagcccaccagccgccaacggtttgaaaacggataaagcctttatctgtgatttgtgtcaccataaagccgacttcatccaaatgtccggcgatcataattttcgggccgttttctgcaccagtttttttggcaattaaactgcccaggcgatctgttgtcacctcatcagcaaatggttctatgtatgatttcatcacttgccttacttctctttcattgcccggtatgccttttgcatctgttaaatctttcagcatggtcaatgtttcatctaattttgccatgttccaaaccctccttcatcagtcctgcattcttattatacaaaacatggcgctaaccatacgactatttcacttgaaaatcgggtatatgtttttacagctttcttttagaaaaagtgaaacctttttctatgcttttcgtattacatcagatcatcaccataagggaggtgccttcacacaatgtttgtcatggttctaaggattattttgcttgcactttttgcttattgtatttatgccgtggtcaaatatgtcgcgaatcctaagagaaggcttaagctggcccaatcaaaagaacatttttatattattgatgaacaaaacaatacccggaagaattttcagctgacgtataaaggcgtgctttttgagggagaaaagcatattccttccaaggaccatccgctgtttattcacacgatctttgtctggacagaatctcctgagaagctgaaacatttctctgcaaaagattttgagaacattgaagaaaaagtgctggaacgatatccaaattgtaagattgactgggaccagcccattaaactcgcaaaaaaagcagaagagcgttaaacgcttttctgctttttataaatcaaacgggctgtagtaaatagcgatgagaatcgcttcaattaccagaagaagcggtactccatacttaaaagaagcgtgtttcgttttatgtctgaaggtttgcatgccaagccagacaccgagcgctccaaatacgatggctatcagccacagccggtcttcagaaattctccacttgtgctgttgcgctttgcgtttgtcaatgcccatcacccaaaaaccgcacagattaatcaacaccaaataagctgcaataatcatgttgcctcatcctttatatagaaaaagccgctctgctggagagcggctctatatgattacttgtttaattgagctttagcagcatcagcaagctgattgaatgcagtaagatcgtttacagcaagatcagcaagcattttacggtttacttcgataccagaaagcttaagaccgtgcattaaacggctgtaagaaaggccgttcatgcgagcagctgcgttgatacgagtgatccaaagtttacggaaatcacgttttttctgacgacggtcacggaaagcatagtttccagatttcatgacctgctggttagctactttgtataatgtatgttttgaaccgaaataaccttttgctaatttaagaacctttttacgacgcttacgtgtaacagttccgccttttactcttggcattgaatttccctcctaattgttccttatccgattacttgatgttagcaagcatttgtttgatacgtttgaagtctcctgcgcttacaacagcactcttgcgaagcttacgcttttgcttttgagatttgttggcgaataagtgacttgtgtacgcgtgagaacgttttaacttcccagaacctgtctttttaaaacgtttagcagatccgcggtgagttttcatttttggcatgggatttcctccttattgcttttcgtttttcggtgcgagcattaagaacatgctgcggccgtccatttttggttttgtttcgactgtcgcaacctcagcacatgcttcggagaaacggtctaatacacgctgaccgatttctttatgagtgattgcgcgtcctttaaagcggatagaagctttcactttatcgcctttttcaaggaatttaatcgcattgcgcaatttcgtgttaaagtcatgctcatcgattgtcggacttaaccgaacttcttttaagttaatgattttttgattcttgcgtgcttctttttcctttttctgctgctcaaatcggaacttaccgtagtccatgattcggcagacaggcggttttgcattcgctgcaactaacacaaggtcaagatttgcgcggccggcgatttcaagtgcttcctgacgggacttgattccaagctggtcgccattttgtccgattaaacggacctcacgtgcacggataccctcattaaccaattgatctttgctaataatgagccacctccatagtttcttcgaattgattcacaactcattttgtatgcattttgcaggcaaacaaaaagtgtgggcattataaaacacccacactacgaacatctgtatcaataaaaatgtacggtcaacctgccaactacatgcatgtgtcaatcaggtgagaagcgggtgcttctgcttgtgatttatattcaattcaataactattctacacaataccggatctttagtcaaggacgacttatccggaacaacttttacattgtaacatgggttttctatgagcgcaagagagaaaaagaaaatctttcatcccccccagaatgcaaagaaccaacaattccccccttatttcgcaatttacaacaaaaccaccgacaggaagaaatgtaaaacaaagttaatctctgaccgatataagaagcagaagggagcctgacacatgaacaaactgatacagcttgctttatttttcacattgatattaaccggatgctcaaatagcagcacatcttccgaatcaaaagtcgaaactgttaagacaactgcagcatttcctcaaaaggggctggagaaagagctaaaaaaactaaaacccgtttcattggacatgaagttcgagagtccacttgctactgagttaggaaagcggaaggcaaaagaagaagctgaaaagcaaagacaaatcgccgccgagaaaaagcttgaaaaagagcgggaggcgaaacgaaagaaacagcacgaggaaaaagcggagagacagcgattagcagagcagcaggcggcagagaatcagcgattagcggaagcaaaaagacaagctgaacttgaaagacagcggcaggcagcaatccaaaaagagcagaaagcgaacgctgagaaaaagcggcaatcgcaggcacaacggcagcagactgaggcacccccatctaatagtcaagatccaccatcttcctcgagtcagacagataaaaccattcaacagccagcttcagagcttcctgatgacgatggttatggttatgaagaacgaaaaaagtggcatgacgatcaagtagaatggggcattaaacaagggtatatcgatcccgaagacgcaccataaaataaaaaaagccaaggcattcagccttggcttatccaccgatcagctgcacgaacacagggatgaccagaaccgttaccactcctactacgacaacagcaatacttgccatcgcagcttcaacttctcccatctcaatcccgaccgctacaccaagtgcatgtccggatgttccaagagccaatcctttagaaatcggatttttcactttaaacaccttcaagaacaatgctccgagcgcatatacgatgacagcgttaaagatgaccgcaaaggctgtgatgtcgctgatgcccccgatgccttttgataaaggaagcgcaattgccgttgtagccgcctgcggaagcatgcttttcattacggccgaatcgagatgaatgcctttagcgagcaaataaacaatcgtgacagagcagatagagccggcaataatggaggccatgatttgccaccagtactttttaagcttatctctttgtttgtacaaaggaattgcaaatgcgatcgttgccggttcaaggaaaaacttaatgatctctcccccgttattataatccgcgtaggaaaaaccgccgatttttaaaaatgcgatccccagcaccatggcaacaaacaaaggagtgaaaaggaagaagcctttcgttttcttaaataaaaaggtgccgatgccgaatgcagcaagtgatacgacaatcccaaaataaggactcattgtgctttccatgtgaagaacctcctgtttcccttaatggtgaacgagttcgttattgttctgcgggctttgcactgtttttgttttcatgtccgctgcggttttgcgttttccgctcagcgacagaatcagctgagaaaacaatcccgtagcccccagcaaaataatcgttgcgagcagaatgacaagaacaatttgcaggccgtattgctgcatcacaccgagcgaattcataacagatatacctgacggaacaaataaaaatccgatcagagaggtcaaagacgttccgagcgtctccacttgttccagtttaatgactttcaaacataataggagaaataataagaccaaccctacaaccgatgccgggataggtattgggacaatagcggcaatcatatttgaaaccagcataatgacggcaaaaataaatgcttgtgttaaaaacccgtacacttttttagcactcattttcttcacctctttctctttggtacccccattataaataagaattccctgttataaagcgcttacaagataacatgccgaatagcgggtctgagttgcagaatcaaatggctgaaatgcaaaaagccgcccatcaaatatggagcagctttttcaattccttcgcatatgtccggctgaccggtattttcgatccgtctttcatgatcaaattatacgttgaattaaaccatggctgaatttctttaatatattcggtattcacgacaaagctccgatggacgcggataaaatcagaatccggcagctttttctcaatcacaacgagtgtatcgctgaccgtataagaatgatcgaaggtttttacattgacatgaccatcttctgttccggcatagataatgtccttcgtatccacaatcacaatcgattcccccacagatagcgcgagcttgtgctggccggcatggctgttttgctctgtttctacaatatcccgattgacttttttatattttttcagcgtttgctgaattctttcttcatcgaatggcttggttaaataatcaagagcatccacctcaaacgctttgagtgcatactggtcatacgctgtcgcaaacacaacagcaggaggatgcttcattttcttcaatcgctttgcgatatcaaaaccgttttctccagataaatcaacgtctaaaaacagcaaatcaggtttttgatccatcatttggtcaaaagcggattcgatattttccgcttcattgatttccatttcctcattggtccgcttaagcaagtaagccagttcatctcttgccagcatctcatcatcaactattaacaccctgagcatgttcttctccctctttcatctgttgcattggcacttgaaaggaaacctctgtccctttatgaacctcactgctgatatgcagtgcagcctgctgtccgaataaaccgatcagccgctgatttaggttataaagcgctgtaccggttccctccttagacggaaacggtttctttcccagttccggcaagacgtccggcggaattccgcgtccgttatccgccaccttcatatagacggatgcattatcagataagacacagactgtaaccttgcatatgtcttgttttttcggaaacgcgtgccgaagcgcgttctcgacaagcacctgcaaaacaaacggagggatttcaatctgctccagtctgctgtcgatattaagctcaattttatatttcccgggaaaacgcgcctgttctaatgacaaataggcgttaagatggtttagctcctttgagagcggaatcagcagctgtctcgctccttgaaggtttgaacgaaaataaacactgagctgcaataggagcttacgggttttttcaacatctgtacggcatagcgcagaaatcgtgttgatcgcattaaataaaaaatgcggattcacctgtgcttgaagcgctttaatttcagcatccttgagaagtttgctttgcagctctgcttccccaagctcaagctgtgtcgaaaacagcatggccagcccctcggcaagttcctcctctacctgactcaggcctgccgggcttttaaagtacatttttaaggtgccgattgtattgccgttcgatgtcagcggcagaacaattgcagcgtgcaaagggcattcagcatgcgtgcattcaatctcttcctgcgaaatcgccttcataatatgccctgttttaatcacctttttggacagcccggtgatcaaacttttcgatgggatgtggtgatccattcccgcaccgacatgcgcaaggatcttttctttgtcagtgagagacaccgcatctgttcctgtcagcttatggataatagccgctacacttttacaggagttctcatttaatccttggcgaaaaaatggaagtgtctgatcagcaatcgtcagcactcgatgcgtttcgagagcccttgcctgttcttccttgcgaatgatcgcttgaataatagacagaaaaataaaactgcctgttccattgatgagtatcatcggaattccgatcatgctgacaagctcccaagcgtcactgaacggctttgccatcagcaaaataatgatcatttgcagtgactccatgccgattcccacaagagcggcgatgcgcggtgtcggcattcgatatcgcttcgtaaaatacctgccgatcaagcctgcaagaacacccgctaaaatagatgagacggcacagcttaaggccgtgctgccaccgagtgaaaaacgatgcaggcccgcaagtatgccgatcccagcccctacaaaaggacctccgagaaggcccccgatttccacgcccaaaatacgggtattcgcgatagagcccgatggatctatcgtaaacacccagtcattgtttacaatcatatttctttgaatttcgatgcctgtataattgctgatgatgctgaaaagagaaaaaatagaaattaaaatcgcttttcctttatagccgtcctgattctgaagagcttgtctgaaaagtttcgtatgggcgagaatgaaccctaatataacaataatccccactctctccagcatcataatcattaaatgaatcattcatgtcacctgttctttccgttttcattctagcatgttttcgttttacggctgactgtttttttaaaatcgtctgaaaacatatttcacaaggcttttatctattgtaaaataaaacatgagccttttggcagaaagatttgaatctgaagcagaggagaagatcatgaaagccgtattttttgatttagatgatacactactttgggacgaaaaaagcgtcagaacaacatttgcagaaacttgcttacaggcggagaaaaaatatggccttgcccctgaggaattcgaagcagctgttcgcgaagcggcgagagaattgtacatgtcatatgagacgtatccatatacagtgatgatcggcattaacccgtttgaaggactgtggtccaatttctcagagccaatcagtgaaggctttcaaaagctgaacaagattgtgccggagtacagaagaaatgcatggacaaacggactgaaagcgcttgggatcgatgatcctgcatatggcgaatacttgggagagttttttgcggcagagcgcagaaagcgcccgtttgtatatgatgaaacttttgctgtactcgatcaattaaaaggcaagtatgaattattgcttttgacaaatggcgatccgagtctgcaaaaggagaagcttgccggcgtacctgagctcgctccttacttcaatgaaatcgtcatctcgggcgcattcggcaagggcaagccggatgtttcaatttttgaacactgccttaagctgatgaatattgaaaaagacgatgccatcatggtcggcgataatttgaatactgatattttaggcgcttcaagagccggaatcaaaaccgtttggatcaaccggacggataagaaaaacgaaactgacgtaacgcctgattacatcatcagcagccttcatgatttgtttcctatattagagaaataaaaaagcatgatctcttcaacgagatcatgctttttattttattttttcgcttcagctactgcctttttcacaaactcatcaagtgaaatggtttcagagttctgctctccatacttacggacgtttaccgctccgttttctgcttcttggtcaccgaccaccagcatgtacgggattttttgcatttgcgcttcacggattttgtagccgattttttcatcgcggctgtcgacttcaacacgcaggccttcacgctgcaggcgttcctgcacttttttcgcgtagtctaaatgcacagccggagaaaccgggatgacttggaactgaaccggtgcaagccatgtcggcagcgcgcctttgtgttcttcgattaagaaggcaacaaagcgttccattgttgaaacgacacctctgtgaatgacaaccggacggtgctgcttgccgtcctcaccgatgtatgtcaggtcgaaacgttccggcaataagaaatcaagctgtaccgtagacagtgtttcttcttttccgatcgcagttttcacctgaacatcaagtttagggccgtagaatgccgcttcaccttctgcttcgtaatagtcgtggccgatttcgtccattgcctctttcagcatggattgcgctttgttccacatttcatcgtcatcaaaatatttctctgtatcttccggatcgcggtaagacagacggaatgtgtaatcacttaaaccgaagtcttcatatacatcctggattaaacggactgtacggataaactcatccttaatttgatccgggcgcacaaagatgtgtgcatcatttaacgtcatcccgcgtacgcgttgaagccctgacagcgcacctgacatttcatagcgatgcatcgttccaagctccgcaatacgaatcggaagctcgcggtaactgtgaatgtcttgtttgtaaatcatcatatggtgtggacagttcatcggacgcaatacaagtgtttcattgtccatttccatcggagggaacatgccttcctgataatggtcccaatgccctgatgtttcatacagctctttgctgccaagcacaggtgtgtatacgtgctcatagccgaggctgatttctttatcgacaatgtaacgctcgatgacgcggcggattgtcgcgccttttggcagccaaagcggcaggccttgtccgactttttgagagttcgcgaacagctttaattctttgccgagctttctgtggtcgcgttctttcgcttcttctagcatacgaagatgctcttcaagatcagcttttttgaagaaagctgtaccatatacgcgctgaagcatttggtttttgctgtcgccgcgccagtatgcgcctgcaaggcttaacagcttaaattctttgatttttccggttgaaggaacgtggacgccgcggcacaggtcaaagaattcgccttgctcatagatcgaaacggtttctccttcaggaatcgcatccaatagttcaagcttcaggtcgtcgccgatttccgcaaaacgggctttcgcttcttcacggctgacttcttttcgaacgatcggaaggttcgcattaacgatttttttcatttctttctcgattttcggcagatcctccggtgtaatcgcttcgtccatttctacatcgtagtaaaacccgttttcgataaccggaccgacgccgaatttaacatccttgtagatgcgtttaatcgcttgagccagcaagtgagccgtactgtggcgcataatttgaagaccttcttctgagccttctgtaatgatttccactgtaccgtcttcattgatcggcgttctcaaatcgatttcttttccgttcagttttccggctaatgattttttctttaatcccggactgatggatgccgcgatatcttctgttgttgttcctttcgcaaactccttgactgctccatcaggaaatgtgatttttaccatatctgacatctttgtcactcctttttttgcatataaaaaccccgccccctatgaaagggacgaggttgaataaacggaatcgtggttccacccttttttccgcaaagccaatacggcacctgcggctctaagctctgtaacgggagttcccgtcagccattactgttccttttcaagaggttcacagctgaagttcaaaggcggtaaagcgaatggtccttagctgggaagcttgcagccagggcttccctctctttgagctggtatcattccttcgtgtccttatcaatacgtgtgtctttcttaatctcctatgtattataaattgttcaatccaaaaaatcaacacgatcgcgtttccttttttaaaccgacagccttaaatagacaggctgccggccctcatccttccgagtgcttcaccggtatttctgcatctgtaaaagcatgcagcgggagcatttccactctctcttgaaatacgttttgaatggtccttgccatcatgtgctcgggctggtcggtataaagcacgacttcatcaggcgcaatggaaatcagcggcgcgagcaaatgagaatcaatatacataggatgatcccggacaaatcttctgtctatgtatttcattttttcccgttccggcacatagcgcagctcccataatgtaaaggaaccatcatggacaatatgcacttttttgattcgcggctgtttggcgtccacatagtctctgagtgtttgaataaagttttgatattcctgttccatcttatattcatcaatcgctgcttctgtaatatctctcagctgcttatagtatgatccaagtcggaaggtctgaaaggagcgaatgtaaaatactccttcctctaaacagatcgtttggagttcatccaaaattgattgtttccgtgaaagcttcagcggctcaaacggaagatcgtctgcttcaccttcaataatactgtgtgcgagctgaaggatttgctgctgttcatcctggtccgtgaaacaataagtttcctcaatcaatgacagcatatgctcgtcttctttgcattccaaaaaaaatttgaccagaatcggctccataaaacgctgaataggaaaagccggattcgctttttcaatcccgatttttcgtatgccttcacggacaatgatattgttccgatcgtccgaatgctgaatgagatgtaaaaaagcggctgcatcatggtcatcttcaaagattatttcaagcatgtttgtccccccttacggcatctgttacaagtatatgggggatgtttttaaaatagacgtaaaggtcattggcaaatcttaatttgattcttggaacaagttttgcattttctttctgaagatgaacggcaatgagataaacacgatatacaaagcgagcaccataaagaaagcgggcagattgccagccaaaaagctcgcacccagcacattaagcgcaatcgtcccagggatgattcccacagccgttgcggcaaaatacggcagcgctttgacattggaaaggcctgccgcatagctgacgaaatcaaaattgatcggcaggattctcaaaagaaagatatagaaaaatccgttatcctccatttgcttctgtatggcttcaagcctttcgtaatgcccgttctttttcgccgaaaacaaaccagccgcaaaaaacgaaacagctgaagcgcacatcgaaccgaataacgtataaagcgtgccgagaagcgggccaaacgcaagtccgccagctattgaaataacagacaccggaaataaaacaagtggcctgacgatggatatcccgataaacatcagaggtgcaaagactccgaacgacaatacccataccctgatttctttcggcgatacattcaaatacgttttatttccccaatagagtaaaccagcacctgcaagcactgccagccatttgacagccgtttttcgtttcataccctcagttccttcccctttgaaccacagcaattatggatgtcggcggttttctccgtcaaggcggatcggagcagccaaatataatatccgctccattaatcttgcagcttttacttcttctttttctcccctctgcgaatacgtaaaatgatgcttcagctcgtcaggtgagaaattagaagaaaagaacgttggcagctgctgggacattctgtgctgaagcaccgttccgatgacctcatcccttacccagcttgtcattgattctgctccgatgtcatcaagcattaatacgggtgtggtctttaccatattgagcttctcttccaatgtctggtcttgcagcgaattcttaagctctctcacaaattcaggcacataaacaatcatggaggaatactctttttccgccagctcattggcaattgcagcgagcataaacgtttttcctaccccaaatttcccgtataaatataatcctttcccttttcccgtctcattatagcttttcaggaagtctgtaacatgctgaaacatcgcgagtctgcttgggtcactgatatcaacttgctggaacgtcgctccaagaagatcctgctggatatacatgcttttcataagagactgttgtttcttctgctggtcgagcttccgtttgactggacattcgtaatactcgatatcaatagacctcccattgacaacaagcttcggatggtagccctccaacaaattgttgcagttttcatcttccgaacaataggagcaattcttgctttgttcgatatattcataaagcttatttaagctcttttcgatcattttttggtcaatcacttcttcgttttccttcaaaaatgcttgaacatcttgatctttcatgactttttccttcatttgttcaagacgtttttggaaatccggcctgccggttacgccctgcagggaacggccgattggttccatctattccttcaccccgcatctctgtctttaataggcagagtattttttcagtttttgcatttcttccatcatctttttcttctgttcttccaaatcctgcggatgcagcttctgctgtccggattctgaatcggacgctgtttccttttctgtcatccaatcaggaagcttttcttcacgaatcactttttggtttcgtttcgaagactttgtttttccctcagcccattcaagatactggcggttttcttctattgcgagcttcatcgcttccctgaccgttttcacctttttgcgtgcccaatgcgaagcgattttttggatatagtttttcgacagcttcatgtcggttttcagcatgacataataaattaacacatttgtgacgcctggctcgagcttctgttcgaacataatttcttctatgatcttcagatcagcttttgacggctctgttccgtcagcaatgtcctgcagaagcttcttcggggaaatcgcctccagcaatgcaatcagcttcccatccagagaatcctcttctgccggtttttcgccttcacgcagatgcaccggctgtgttttttccaccaaatcgggcagctgtccgtttctttcaatttgataccagtcgctcgccgcttttcttaatgcctccgtcgtaatgacgtcacgctcatcaattgcgctcatcacaacattttgcatttgcaaagggtcaattccgtacagataagaaagctttttgattgtgtcccgcacctgctgggtcatcgcttttctcggtatcatcgtctcagaaagtcccgctaaaaacaaatcaaaatcaaacacatcctccgttatggtgtaggacggagactgtccgacagaagtatactcggacccctcggcaagccttaccgtttcctccatatcggatgtgagcttccattcactcggctgcagcgattcaaacgcatgattaaacggacgcgtaatgtccttcgcatcttctgaaatggccgggtgcgtaaaaaattgttttaattgctgatatttcgtttttccgaccctattatacagaaaaacattcagcattccgtcttcaaaaaattcatttggtctgagcggcggaaggagttcatatataaagaggcgctcctgccgctcggattctttcatatatactttcagcaatccgatgccctcgagcttcccctgttcctgatggatcgtttttaagttggactgtgtcatcgccatcagctgtctatgtgtggactctccgccccacagacggttttgttcaagctctccccacaatgtcatataaagagagaatgcaacagggccgattaagggctggtacagttgtgtaataatttgtctgtcaatatcctgcagcatcgatctgcttttaaccacatacgggtctacaggcagtacatctttccaatagtcagccatacattctcaaaccttccgaatttgtttctacctttcattttacaccgtttcttatatctatcaaatgccaattttgcacatgagaaaagagctagaagaatcctcttagctcttttaacgctctttctttattaagtcttttaattcatcgataaagacgtttatatctttaaactgccgatagacggacgcgaaccgcacatatgcgacttcgtcaatcttagccagccggtccatgaccatttctccgacgagctcactcttcacctcggagcagccttgattgcgaagttctttttcaatatcaaagcacatgtcttcaagcgttttgagtgaaacaggccttttttcacatgcttttatgaggccgcgcagcattttttctctgctgaattcctcacgcacaccttcttttttcacaacgatgagcggggtttcctccactttctcaaaggtcgtaaaccggtagtggcaggattcgcactcgcgtcttcggcgaatcgactttccgtcatccacaggccgtgaatcaaggactcgtgttccgttatgctggcatgaaggacatttcaataaaatcagctcccaactatatcgttccctgcaatgtattttcggcagcctccgccttttaaaaatagatgtgacagcatctgtcgggagagccgttgttaaatttgtttctatagcattaggtggtttgtgaaaatctccttcttattttacaaaaaaaatgaaaaaagaaaaagctgacactctcgtttctttataaaaataaaaggagcataagctaaaaagcgcataatggctttctagcttcagctccctttgtgttcgcaatttactttatagtactttcgcttgcgcctgtttaatttgcacaggccccattcctcttggtatttcaatgttttctcttgtatcagcatgtaatgcctctgcaatgtaatcagcagcgacattaggatctaagtctccacaagtataaacatcaatgctcgcatatccgtgctcaggaaaactgtgaatcgttaagtgtgattcagaaataatcacaactccgcttacgccttgcggtgcaaatttgtgaaatgcaacctcgcgcacctcagcacctgattttagagcagcatttacaaacgttttttcaataaaatccatgtcattcagcttatcaaaatcgcatccccatagctcggagataacgtgacgccccattgtttccatagtcatggacccccttaacaagaattaaaaagtgaaattccaacaactgggtcggccatttaccacgggggaaagttagtccggagaggtcctaaccctttaagtaattccgaaacagtctcaagcaagaagttcacgaaaaatagtatactgtgtttaagtctaatttgcaaggtgcgttttttcagaaatatgctgttaagggttttttctttaaaatgtgtccatgaccttattttatacagcagacggatgtttcattcgtgccgctacatggcggattagatcaacaactctgcaggagtagccccattcgttgtcataccacgccagcacctttactttcctgtcttccattaccattgttgtaagcccgtcaatgaccgctgaatgcggattcgtattataatcagtcgaaacgagcggttcatctgagtaatcaagtacaccgtacatcgacgttttggcagcgcgtttaaatgcctcgtttacttcttcagccgtaacatccgttttcagatcaacaacgagatcaaccaatgagacgttcggaacagggacacgcaaggcgaggccgtgaagttttcctttcagatgcggcagcacaagcgaaagcgcctttgccgctcctgttgttgttggaatgatggattcaccgcaagcccgcgcccggcgcaaatctttgtgcgggttatcaatatttttttggtcattcgtatacgcatgaactgtagtcatcagaccgctctcaatgccaaactcttcatccagtacttttacaacaggcgcaaggcaatttgtcgtgcatgacgcatttgaaataatgacatggcgctcagcgtcgaattggtcctcatttacgcccatcacaatggtaacgtcttcattttttcccggagcggtcaaaatcactttttttgcacctgcttctatatggcccatcgctttatctttagcattaaacttccctgttgcttcgacgactatgtcaatatcatattcccgccaaggcagctgttttggatcacggctgtttaacaaaagcactttctttccatttacgatcaggctgtcttcaccagccacaacctctttgtcgtatctgccgtgaattgtgtcatactttattaaatgagccagcgtttctgcggaatagctggcgttaatggccactacttgaatttgatcgtctaacatcgcttttctaaaaaccattcttccgattcttccaaacccgttgatcgctacttttaccttcatgttggacaccccttatcaattatgccatcctaatttgttactatctaaaattagtataacacattaaaacaaattcgccagtacatattgataaaaatcaacgattataacgctaatttatgatgcatcttatgttttcttgcacagaatatcaggcgtaagaaccaaaaagcagccagcgctccgcactgactgccctcatgctttatgattcctgttttaacttatcattgagcacactttcttctagcacagaaaatgtatccccgtatactctgttaatatgattcgctccccaagcacacagcatatctaaaattccttctaagctgcggccgtattcgctgagctcatattccactttgggaggaacttgattatatacgattcggttaatgacaccgtccgcttccagctcgcgcagctgctgagtcagcattttttgcgtgatattgggcattaggcgttttaattcgcttgtacgtttttttccgtgcgtcagatggcataaaatgacgcatttccatttccctccaatcacttcaagagtcgcttcaacagaaatgttatattttttcttctccatacaatccattctcctcacaggcaccaaaaagtgactatagcacttcaaagtacgtacttttatttcttaacgatatgtttcataatcacatttgccggctgatttgaatctgctcttttttatttatatagcttactcggcagaatttcaatcatacaacacatcttacaaaggaggaacatcatgacttcagccaaaagcagtattcctgcactactggctttggccgtaagtgcattcgcaatagggacaactgaatttatcagtgtcggccttttgccgctcattgctgatgacctgcatattccagtcacgacagcaggattaaccgtttccctttatgcgctcggcgttacatttggggcacctatattaacttcattgacctcaagcatgtcgcgtaagacactattgctttggatcatgtttatttttattgccggtaatacgatggcagcaaccgcttcaagcatcgggattttactagcagcacgtgtgatatcggcattttcgcacggtgtgtttatgtcgatcggttcgacaatcgcagcggatattgtcccggaagataaaagggctagcgcgatttcaattatgtttactggcctcactgtggcaactgtaaccggagttccttttgggacatttatcggccagcagttcggctggcgtttcgcctttatggtcattatcgccgtcggaatcattgctttcattacaaatggtattcttgtaccgtccaaattacgaaaagggacgaaaacaacgatgcgggatcaattgaagcttgtgacaaacagccggttattgcttttatttgtcattacagcgcttggatacggaggaacattcgttgtgttcacgtatctgtctcccctgcttcaggaagtaacaggcttcaaagccgggactgttgcagtgattctgctcggatacggaatagctattgctatcggcaatatgattggcggaaagctgtcaaaccgaaatccgattgccgctttattctatatgtttatcgtacaagcaattgttctattcgtactgacatttacagccccgtatcaaacagcagggctcattaccattctctgtatgggattgctggcctttatgaacgtgcccggccttcaggtgtatgtcgtcatgctggctgagcgttttgtcccgagtgcagttgacgtcgcatccgcgatgaatatcgctgcctttaatgcaggaatcgcgcttgggtcataccttggcggtgtgatcaccgattcaatcggattgattcataccgcttggataggcggattaatggtggtcggtgcagtcattttaacaggctggagccgcttaatggaaaaacgagatcggcaggaagcctgacaattttaaaggaggaaatgaacatgacaacacatttacaagcaaaagcaacacttcataatggggtagaaatgccttggttcggcctcggcgtgttccaagtggaagaaggatctgaactggtaaacgcagttaaaactgccattgttcacgggtaccgcagtattgatactgcagctatctatggaaatgaagctggcgttggagaagggattcgggaaggcattgaagaagcaggcatttcaagagaggatctgtttatcacatcgaaagtatggaatgcggatttaggctacgaagaaacactcgccgcgtttgaaacaagcctatccaaactcggtctggattatttggatctatacctcatccactggcctgtagaaggaaagtataaagaagcttggagagcgcttgaaacgctgtataaagaaggccgtatcaaagcgattggcgtaagcaacttccaaattcaccatcttgaagatctgatgacggcagctgaaattaagcctatgattaaccaagtggaatttcacccgcgcctcacacaaaaagagttgataagatactgccaaaatcagggcatccagatggaggcttggtcacctttaatgcaggggcagctgctggatcaccctgtattggctgacatcgctcaaacatacaataaatctgtcgcacaaattattttgcgctgggatctgcagcatggcatcattacgattcctaaatcaacgaaggaacaccgcattaaagaaaatgcaagcgtatttgactttgaattaacgcaggatgacatgaaccgaatcgatgcactgaatgaaaacttgcgagtcggtcctgatccggacaactttgatttttaatggcaaaaaaacaccgttcaatatgaacggtgttttttgtattatgcccagctgttcatgatttcatcaagctgccttttggtctcttcaagcgtgccgctgttatcaatgacttgatctgctcttgctgttttttcctctaagggcatttgagagcggatacggctgactgcttcttcttccgtcagctgattgcgcttcatcagacgttccagttgaagctcttttgtcacactgaccacaataattttatcaaccaatgattccaatttgctttcgaacaatagcgggatatccaatacaacaaatgcctcccgatttgcaacggcttcatcacggcgattgagcatttcctgcctgactgcgggatgaacaattgcatttaaagcgagacgcttttgttcatttgtaaataccagcgctccaagcttttttctatctatatcgccatttgagagcagtatgtcttcaccgaattcgtcaatgatttgccggtaggccggcatccctttttctaccgcttgttttgcaatgatatctgcatctataactgttattcctttttcaatcagcatattggctaccgtgcttttgccgctagctattcctcccgttaaaccaatgactaaggtcaagagatccactcctttttacaatttccagagcccaatcgtgattaacagaagccccggcaaaaacgccattttatcgatccatttccacttagacagaaaatggccggcattggttccaattgatacaaacagcgagctcatgattgccacggcgatgctcatcacaatcggtgaaaaaccgagaatggctgcgcctatgcctgctccaaaggcatcaattgataaggcaaatcccaataagaccgcctcaattccattgatcacacccgatttgtcgatatccgcactcatgggttttctcaaaatatgaatcacaatccctaatgaccgaacctctaaattaagcagcgttttttcatgcaataggtattctttatcttttgccggtttgaagaattggtacagaacccacgcaccgattccaaccaatatcaaaccgccaagcttctccgtcacatatacaggaaaaaacttcgtgagaaagcttccgatcagcatggatataaacatgacagcaccggaacagcaggcgataaccaaaatcgctttaaacggtattttcatttttctcaatccgtacgtaaatccgactgaaaaactgtccaagctgacagccaacgccagcagcagtatagaaaccatttgcatatccgtttcttcctttctgttggtgctcttgtatcagatgtgaaatgcccgggattcatcacaatcatatatatgggaaagtgaaaaatccgtgtttcgaaaatggcatcctccattacagagttactgatatatgcaccgacagcttggacgatgaagcattatgctacttttttttctggcactttgcgcaaaaatgcgtgcctcttcctccaacgacaattttcgaaatcatcgttccgcaatttttgcatggctcgtctttttttccgtacacaaaatgctgcagctggaacattccgatttccccttgggagttgatatatgaacggactgtgcttccgcccgcatcaatcgcctcctgcagagtgtttttgatttcagcgtgaagggttttgattgttttatctgataattgatttgcttttatctcgggatgaacacccgctctgaaaagagcctcatccacataaatgtttcctagtccaactaccgttttttgatccagtagggcagttttgacagcgcggtttgttttcgcaagccgttcttttaaatacgcactcgtaaattcttctgcatccggctccggacctaactgagaaagcgggagctcgcccgcttcttctcccggtttaaataagtgcatggttccaaatttccgcacatccctgtaccggagctgggttccatccgtcatcgtgaatatgacatgcacgtgtttatcgtcaggctcctcggcttgatgaagaccgtattttccttccattcgaaggtgagaaaccataacataatgatctaaatgaaacagtaaaaactttccccgtcttccgatggactgtatcgtttctcctgctagttttcgcgcaaattcctccggttcggcaggccgtttgatgatattcggccatctgatctctaccgatttgattgtttttccctttacaagcccggtcagagtgcgccggaccgtctcaacttctggtaattccggcacatccatcacttcctatctctgtttatttcgcatcgtaccaagatgggcctgatgcaaagtccacctttaacggcacatctaatgcaagcgcatgctccatcacttcaggaacaagcttttcaagaatttcaatttcttcctttggcgcctcaaaaatcaattcatcgtgtacttgaagcagaagccttgctttcaactgtttttctttcagcttggcagccatgtcaatcatggcttttttgataatatcagcggcgcttccttgaatcggcgtattcatggccgtccgctctgcaaaacttcggatattaaagttccggctcgtcagctcagggatgtagcggcggcgatgcataagcgttgttacgtatcctttttgcttcgcttcctgtactgaatcttccatgtacgcttttacgccttggaagctttccagatagcggtcgataaatgctcccgcttccttccgggtaatgccgaggttctgtgacagaccgtaatcgctgatcccgtaaacaatgccaaagttgaccgctttcgcctggcgtctcatcgcagatgtcacttcatccttagcgacatggaacacatccattgccgttttcgtgtgaatatccatatcatttgtaaaagcttcgatcagattatcatcctttgaaatatgggcaagcacccgcagctcgatttgtgaataatcggctgcaaaaatgagccagtctttttcagacggcacaaaagcttggcgaattttccgcccttcctcaagcctgatcggaatgttttgcaggttcggatcagtcgagctgagacgaccagtttgcgttaaggcctggttaaatcgcgtgtgcactttatgcgaatccggtctcgtcacctttaaaagcccttcgatatatgttgattgaagcttgccaatttgtctgtactgtaaaatatagtcgacaatatcatgcttgtcagccagcttttcaagcacatcggcagacgtagaatagcctgttttcgttttctttacgacaggaaggccgatcttttcaaataagatgacgcctagctgtttcggagaattgatgttaaacggctctcccgcaatctcatggattttttcttcatattccttcagcttcgcacccagttcttcacccatccgttttaaacggtcaacatcgactttgacgccagttgattccatttcgccgagaataagcgcaagaggcatttccagctcttcaaacagttcaagctggtcgttgttttccagctcctgaacgagcttttcccgaaggctttgaatcgctaacgctttgcggccaaggtgctcagacagtacgtcttctgacggcactgctcgttttgctccttttccataaactgattcatcacttgaaacgatatgcaagccgtaatccttagccacactcgcaacgtcgtcatatgaattgcccgggttgatgatataagccgcaaggagcgtatcaaactcggctcctttcagctcaatgccctgccagcgcaaagcgacaacagcccgcttgctgtcgaagacccatttcttctgctcgtcattttccacccattctttaaacacctcagactcaacggcagtgtctttcggaatgaaataagctcccttttcatttacgatcgaaaatccgagaatcggctcttcatgataattatcgccaatctgttcaacgacaaatgcggatggagaaaccaatatatcgcttgtcacgtctgtgactgttttgacattaatgtcttccaacgattgatcctgttctgcttctgcactgtcttctccaagccgttcaagaagcgtgttgaagccaagatctttaaagatggcaatgacctgttcacgattaaagccttgatattccaggccggaaacagatacctcaatcggagcatccgtcataattgtcgcaagctccttgctcatcaatgcttgatccttaaactcctcaagcttttccttcaatttctttccgctcacctcgtcaatggactccagcagcttttcaacggaatcaaattgttttaaaagcttaatcgcagtcttttctccgacgccgggcacacccggaatattatctgaggaatcgcccatcagacccttcatgtcaatgatttgttcaggcgtaagcccgtatttctctttgacatgctccggtgtgtaaaattcaacatcggtaattccctttctcgtaatggcaactgtcgttttgtccgttgccagctgtgttaaatccttatctcctgagaaaaccttaacttcaaatccgtctttttcagccgatttggccagtgtgccgataatatcatccgcttcatattgttccagttcatagcggctgatctggtaggcatccagcagctcgcggataaacggcatttgttcggaaagctcaggcggggttttctgtctgccgcctttatattctttaaatgtgccgtgacgaaatgttgttttcccggcatcaaacgcaaccagcatgtgcgtcggtttttcatcctcaagcattttcatcaaaatcatcgcaaagccgtatacggcatttgtatgaacacctttatcattgcttaacagcggcaatgcaaaaaacgcccggtaagccagactgtttccgtctacaagcactaatttttttcgttccgtcattcaatttcctcctaagaagcctcaggcttccattcatctcttacatagtcattagctcctcttattttaacaaagttcaatttgaaaggaaaatacgtgaactataagagaagacacaaaaaaggacgggaacacaaataggttcccgccgtcaaaattggctccttggatgaaggggttctactacatcctaccagcataggtttaacagtgcatgaagatattgttaaacctttgtaaacattaggcggacttttcagcggcccgtttcagcgtcacggtaaagacagttccccgtccaggctcgcttgtgacatcaattttcccttcatgagcctctattaaatgcttgacaatcgcaaggcccagtccggttccgcccgaattcctgcttctgtctttatctacgcggtaaaagcgttcaaagatgcgcggaatttcttctttctgaattccgattccagaatcagcaacctcaatctgaatgtctttttctctgggctttacattgatagccacggagcccccctcaggcgtgtaggttaacgcattgtttacgagattaagaaatacctgtttcagcctgtacgggtcaccagatacatattgagggtctttcggggcattcagttgcaaggagatgcctttctcatccgccttatgcttcagaagcgtttcaatctcaccaagcattttggccggctcaaacgtttcgatactgagcgtgaaattttgctgctcgatttttgagagatcgagcaaatcctgaaccaaagactgaagcctttcgctttccttaagaataatagagagaaattcagaaagcgcctctttgtcttccatcgccccatccaataacgtctccgtaaacccttttatggacgtaatcggtgttttcagctcatgagaaacattggccacaaaatccttcctcatctgctctaatttctttgtttccgtcatgtcatggaaaacgagcacaattcctttccattcatcgtccggccccataatcggaacgccgtccacttcaaaataacgccgttctattttgatcggaagtcttaacagcttgcatttctttgtctccgtcataaaaatgtcttcgacaagctggatcacttcttcatgttcaaatgcatcgtgataaagacggcgcagcatatgattcggattgatatgaaactgcttggcgtaagatctgtttacgagattaataaagcctcttccgtcgatcataatcagcccggagccaatgttttcaatgactgtcagcagccgatcccgctgcatttcctgcgttcgcgtcatttccatcagatcaatggcaaggctgttcatcgcatgtcctagcttatcagaacgcctaatatagccgccgtacgtccgtgcatcgtagttgcccttagagagttctgtggctacatttgtcgctgactcaattgaccttttataacgtgaggtcatgctggaataaaaataaacaatgacgataaatgcggtacaaagactggccgtcagcatcccccacaattcgccttttaagccgtcgcttttttcagaggcggaaagcagcacatatcctgttttttccccttcgcttctaagtgaaagtccgtaataaagcttgttatctgttgttgacagaataccctcatggccagaaacaagcgcctgcaccttttgggaatcagccgctctcccgttagacccatacagcaccttgccgtctgtatcgataacggatgcgctcacatcaagcgcgccgcctgcatctttaatgattttctcatttgtttgattattcagattgccggcatcaagaagcgaagccaagtattttgcttctttttcaatgtgttcctctgctttcctttgatcagatgtttcaaaaagctgctgtaaaaacagcccgagaacacaaaacaccagaatcatacagacaacgaatacagaaaaaaggcgcacacggtatttattcattcatttttggctcctccagtttataccccaatcccctaatcgttttaatgtagatcggttttttggtattgttttcaattttgtcgcgaagatggctgatgtgcacatcaacaattctcgtatctccggcaaaatcataattccagactgcgctcagcagcagatctcttgtcagaactctgcctttatgtctgcctaaatagagcagcagttcgaattctttcggtgttagttcaagctgactttctttaaagtacgcttcataatgatcaggcaggattttcagatcgccgattacgatctggccttccatttcatcgttcttcatctcactagagggcgcagctatttccgaacgccttaaaatcgctttgactctcgcatttacttctcttggactgaacggcttggtcatataatcatcagcaccgagctcaagccctaatactttgtcgaattcctcatccttcgctgtcagcattaaaatgggaaacatcagtttttgctgtctcagctgcttgcatacttcgattccgtccaattttggaagcatcacatcaagcacaatcaaatcaggcttctctgtttccgcttttttgagtgcttcttccccatccgaggcggtaatgacatcatagcctgaccgttccaaattgtactgtaaaagagtaacaatagattcttcatcatccacaactaaaattttcttgttcatgctgtgcctccagtattataattccccgacatcctatttctctattttatgtcatcttaacatgtttcatgattttattttagcgaaagcaggacattccgacaattcgccttttacatcatttttaaaagaaataaagacgtttatgataacgctttcatttatagtaaaaagagaaaggctgtattaagcaagcctttctctctttttattaggataatactttcatgacatttttgacagattcaactgatttattcagctgcgctctttcatagtctgtcagttcaagttcaatgatttgctcaagaccgttgccgcctacaattgtaggaacaccaaggtagatgccttcatagccgtattccccttcaagataagcaattgtaggaaggacgcggcgctgatccttcaagatcgcttcgaccatttctgtcagagaagccgcaggcgcataatacgcgcttccgtttccaagaagattcacgatttcgcctccgccttttctagtgcgctccacaattgcgtcaatccgttctttcggaataagagtttcaagcgggataccgccagcataagaataacgcacaagcggcaccatatcgtcaccgtgtccgccgagtacgaaaccagtcacatctttcactgacaggtttaattcctctgccacaaatgttctgaatcttgccgtatcaagcacaccggactggccgattacacgctctttagggaagcctgattctttgtacaccgcgtatgtcattgcatcaacaggatttgtcagcaccacaataatagagtcaggagaatatttcacgatttcccgcgtaacgcttctcataatcttttcgtttgtagagaccagatcatctctgctcataccaggttttcttgcgataccggctgtaatgacaacaatgtcagagccggctgtatcctcgtaattggatgttcccgtaatttttgcgtcaaagccttgaaccgggcttgcttcaagcatatcaagcgcttttccctttgtcgggttctccaattgcggaatgtcaacaagaacaacgtctgccagctctttttgagcgattaaaaatgcagttgtagctccggtaaaacctgctccgataacagaaacttttttacgagtatttcccatgtctctcttctcctttatggctagttttaggctttttccttgcttagtccatgtttttgatcagttcttctccgaactctgaacatttcacttcagtcgcgccatccattaatctagcaaaatcgtaagttacgactttggaagcgattgttttttccatagatttgataaccaaatcagccgcttcgttccatcctaaatgctcaagaagcagaacgcctgaaagaataactgaagatgggtttactttatcaaggcctgcatatttaggagccgttccgtgcgtcgcctcgaaaatcgcatgtcctgtttcgtagttgatgttcgctccaggagcaatgccgattccgccgacttgcgcagcaagagcatcagaaatgtaatctccgttcaagttcattgtcgcaacgacatcaaactcgtttggacgcgttaagatctgctgaaggaaaatgtcagcaatgctgtctttgataatgatttttcctgctgcttccgcttcgctttgcgctttgttggcagcgtcttttccttcttcttcagcaatgcggtcatattgagcccatgtgaagactttatctccgtattctttttcagcaagttcatagccccagtttttgaaggcgccttctgtgaacttcatgatgtttcctttgtgaacaagtgttacagatttgcggccatgctcgatcgcataatcaatggcagctctgaccaagcggcttgttccttcttctgaaacaggcttaatgccgatacctgatgtctcagggaaacggattttattgacgtttaactcattttgaaggaagctgataagcttttgcacttcttcagagccttttgcatactcgatgcctgcgtaaatatcttctgtattttcacggaagatgaccatatcagtatcttcagggcgttttaccggtgacggcactccagtaaagtatcttacaggtcttaagcagacgaataggtcaagctcttgtctgagcgctacgttcaaagaacggataccgccgccgacaggtgtcgttaacgggcctttaatcgcgatgaaatattcgcggatcacatctaatgtttcagcagggagccactcacctgttttattataagccttttctccggcgtaaacttctttccatgtaattttcttttcgcctttgtatgctttttctactgctgcttccaaaaccttcgaagccgcgttccaaatatcaggaccggttccgtctccttcgataaatgggataatcgggttgtttggtacgtttaatactccgttagagactgtaattttttcaccttgtgccacaataaaaacctcccagtatgtaattcatatttagaaaacattttatttttcttatatagaaaataaaatgatttttcctaacattcaatttaaagtgtaacccaattttgatgttctgaacaagaggctaacctcattgacgcaagccagcctccaatggttctttaggctctttcttcaatcggaacgaatttttgtttgtcagggcctgtgtaatctgcccgcgggcggatcagacggttgttgtcatactgctcaagaatatgagcgagccagccggacattctgcttacagcaaaaatcggtgtaaacaaatcatggtcaataccgaggctgtgatatacagaagccgaatagaaatcaacgttaggcggaagctttttctctgatgtgacgatgtcttctatacgaatcgacatctcataccatttgctttcgcctgtcaggttggtcaggcgcttgctcatttctttcagatgcttcgcgcgcggatcaccatgcttatacacacggtggccgaatcccatgattttttctttcttttcaagtttagcgcggatgtacggctcagcgttttccacttcaccgatttctgtcagcattttcataacgccttcattcgctccgccgtgaagaggccctttcagcgcgccgattgctgcagtaatgcctgaatagatgtcagaaagtgttgcgacgcagaccctcgctgtgaacgttgacgcgttcagctcatggtcagcatgtaaaatcaatgctttgttgaaggcttcaacttcaattggtgaaggctcttcaccgtttaatgtgtaaagaaaattctccgcaataccgtaatcttctctcggttcaacaggctcaagacccttgcgaattctggaaaacgctgcaaccaggccaggcacctttgcctgaaggcggatcgcctttctgtagttggcttccgggttcatggtatcagcctcgctgtcaagcaggcctagtaatgaaattgctgtccgaagagcagccatgggatgaacattttcgagggaataagatttgaagtgctcaataatttcttgcggaacggcagcttcctttgcaagctgctgctttaactcttcaagctcttttttgtttggcagccttagatgccaaagcaagtagatgatttcttcaaaacttgcattctctgtcaaatcatcgatatcataccccacatatgtaagggtatcatcaataatagaactaacagatgatgttgttgctacaaccccttcaagaccgcgtgtcgctgtcatatataacatctccttttcaataaatttcccctttaagagtgttgtaaaaacatgaggcttacttaaaaagcacgatgcaagtatttctctcccccaaaaagaaaatgcttacattttactggctgctggaactaaaaccctttgcttatgaaagaacataacaaattcttataagcttatttaagtttaagcctattctcattataaacaataatcagacatttgttaaatgtttacctataattttttttttcattctgtgatttccccgaaaaaacgcctttatttgcgggtttttgcataaaaaaaaagcggctttaaggccgcttttttttatgaagtgaacagttttacgatctgcatggctaaataagcaatccccgctccgatcagcggccccaccgcaactcctccaaaaagcgcgactgcaagaatggtcccgatcacgagagcagttgtaatatgcggatcattttcaagcagggccaggccgttttttgcaatcagcgccactgcgatccccgctccaagggcgatccatgcgtaggaagaccgcattgcttctccaagctgcttaaatccgatttctcccgtggcaatcgggacaagaacggcgatggtaataatggtcacaccccagttaatgccttttgactggatggtcggaaataatttctgatcaagcccaacgattttgatgatcaaaaggacggatacagcaaagagcaatgattggttttttgcgataagtgcgatagccaagagtaaaattaaaaataaattcgcttgtgtaaacacatgccatccctcctttaagatgaatgtattcatattcagccgcagcgtgaatacatataaaaaataggacatgctgacgagaggaggaccgttttcgtgaatcaatcttatatcactatttttttcagaaccctctttgtcatatcaatgaccgcagggtcgatagctgcggcctattattcgtttccgttaacttatccgttcctgatcgcccttattctttcttcagtgattcatcctgttgtcgattatttggacaaagtgacaggattcccccgaacgataaatgttctgggcgttcttgctttttttctgctcgcagccttcggcgtcctcaccattctggtagccgaaatcgtaacgggaacagcctatctagcaaaaacgctgcctccgcatatcagcacgtttatttcatattgcgaaaaattgtttaccactcatattcagccgctctataacgagttaactcttttgtttcaagaattggaaacgaaccagcaggcttccatcgtcactcatatccagacactcggtgattctgccgctaaaaatgccgggctcctgctgtcccacattctagagatgatcccgagatttttcgctcttcttcccaatacggcggcggttctgattttttctcttctggcaaccttttttatgacaaaggattggcataagctgaaagccatgcttgttttaattctgccggatcgtgtgacagctaacagcaaagcaatcagcagcgaattaaaaaaagcaatgactggttttatcaaagcacaagccgtcctcgttttcatcacgatggtgattgtatttatcggcctttctctcttaaaggttgaacacgccgcaacaattgcttttttaatcgggcttgtagatcttctcccttacttaggtgccggctccgtatttgtgccctggattttgtatttatcgattacgggccagctgccccaagcaatcggaattggtatcctgtacctcgtcgttcttattcagcggcagctgacagagcccaagatactaagtaaatctatcgggatcgatccgctggcaacactcatcgccctgtttgccggctttaaattattcgggtttttaggactgattgcgggaccggctgtactcgtcatcatccaagctttcatcacaacaggcgcattaaaagaaatatggtcctatatcaccgttcagcaaaaataaaacggcagccgttttttcatggctgccgttttttatttgatgatgatccgcttattcttcgacattcctctcagccatttgaacagaatcggcttacaccagccgcgggtaaacgggataagaagacaggcgccggccaaatctgataaaaagcccggaagcatcagcaatagaccgccaatgaaaatgcacagaccgtcagcaatcgcttctcccggcattttgccatattgaagatcacgctgaaccttataatacacttcggttccttgtttttttgcagctgctgcgccgataatgccagtcagaatcatgaatagaactgtcggcaaaataccaatcagctttcctaaaaataggaatataccgatttctattgccggaaacacaataaaaagcaaaaacaaaaatctcatatccaagccccccacacgtgtaacacgttctgttcaacaaaaggcatgataaagagaaaaggaagggattccccttccattttcacctgtaattaaagaacgctcgcacggccttgatagactgcgcctctggaagcgtcaactgtaatatcctggccatctgtcaaaatagatgtcgcattttccagacccacgataaccgggatgccaaggcttaatccgactaccgcagcatggctagtcaaaccgccttcttctgtaataagagcagacgctttttcaagggatgcaatcatatcacggtcagtgcttttggtaacaagtaccgcaccgtcagtcattttttgctcagcttcttttgcattttgtgcaacgacaaccggaccgtaagctgatttgcgtccaatgccttggcctttagcgatgatatcgccgacagtatgaaccttcattaagttcgtagtgccggactcaccgacagtgccagctgtaataacgataagatcgccgtgttttacaattccgctgttcaatgatttttggacagcatcctcaagcatctcatctgttgagctcgcattttggccgctttccgcgaatacgccagatacgagggcaagctttctggaaatagagtcatttacagtaaccgcaacaatcggagcctgcggacggtattttgcaatcatacgtgctgtatggccgctttctgtcggcgttacgatcgcagcagcattcaggttaatcgcagtatgtgcgacagattgtccaattgcgtctgtaattgtcatgcccacttggtctctgcgttttgagagaatttctttataatttaatgcttcttcagaacgggacgcgatgttatgcattgtttgaactgcttcaaccgggtaacttccggcagcagtttcaccagaaagcatgatcgcatctgttccgtcgaagatcgcgtttgcaacgtcacttgcttccgcacgagtcggacgcgggttgcgctgcatgctgtcaagcatttgtgtcgctgtaataacaggtttgcccagcgcgttgcattttttgatcagttctttttgcacaagcggcacttcttcagctggaatttccacacctaagtctccgcgcgcaaccattaagccgtcagacacttcgagaatcgcatcgatgttgtcaacgccctcttggttttcgattttagggatgatttgaatatcctgagcgttgtgctcttcaagaagctcacggatttcgagcacatccgtagaacgtcgaatgaaagatggtgcgatgaagtctactccttgctcaataccgaaaacgatgtctcgcgcatccttttcagtaatacccggaagattgacacttacgcccggtacgttaacaccttttttatttttgagtgttccgttgtttaatacttttgttttgatttcgcgtttagcggcatctacatcaagtacctcaagaccgataaggccgtcatctaacagaatcgttgaaccttgttcaacgtcatggactaaaccttcatatgtcactgaaattttatctgttgttcctacaacctcgtccattgaaataatgagctctttgcctgtttcaagctcaataccgccgttttccattgtatgtgtgcggatttcaggaccttttgtatcaagcagaattccaacgttcttgccaagttttttacttgcttcgcggatatttttaattcttgcaccgtgctcctcaaaatctccgtgagaaaagtttaatcgagccacgttcattcctgactccattaatttcgtaagcatttcaatactttcacttgccggaccgatggtacaaacaattttagtttttctcatttggttcacttccttctgaaatcttcagccttcatctgcacattagatagacagttcttttgaaagctgatacatgttttgctcaactgtgtgttttgtctcaagtatttctataatatcatggtctacaagcttattgttttgtatacctacacagcgtccgccttttccttcaagcagcagttcaactgcatatgcgccgagacggcttgccaacacacggtcagcagcactcggagaacctccgcgctggatatggcccaatacagataccctagtttcaagatttgtttcttcttcaatgcgtttcccgaattcaacaccgctgcctacaccttcggcaacaataataatactgtgcttcttgccgcgttcgtggccgcgttttaagcgggcaatgatttcgtgcatgtcatagtctgcctcagggattaagatcgattccgcgccccctgcaagaccggcccacaatgcgatatcgccggcatgacggcccattacttcgattacatatgtacgttcatgagaagtcgctgtatcgcgaatcttatcaattgcgtcaattactgtatttaaagctgtatcgaaaccgattgtaaaatcagtgcccggaatgtcattatcaattgtacccggtacacctacacatggaaacccgtgttccgttaattttttcgcacccatataggaaccgtctccgccgataacaacaaggccttcaataccaagcttcttcaagtttgctatccctttttcacggccttcaactgttttgaattcaggacatctcgccgtataaagcttagtccctccacgatgtataatatcgcctactgatccgagttcaagcttttcaatctttccgctgatcaatcccgcgtatccgttgtaaataccgtaaacttcaacgtcatgatagatcgcttttctgactactgcgcgaactgctgcgttcattcccggggaatccccgccgctcgttaatacccctatacgtttcattctccattcacctcagcaacatatatgattaaacataacatgatcattgccctaaaaacaatgaaaagggatctccatcctccctatgaaaccttacctattatacaattaaataaattgtttttaaataaaatttaaggaatgtcacaaaaaataaacgtgagccaaaggcttcacgtttatttagtttaccccgatatattgatcttcaaccgagactttgccaattgctttatatttttcatagcgctgctgaactaattcttcttcgctcagcttcagcaaagtttttaacgattgtttaagggtttcgtccatatagcttgcctgcagcttcacatcatggtgcgctccgccttttacttctttaatcatatgatctataatacctaattcttttaaatccggcgcagtgattttcattgtttctgctgcttttttagcaagactggagtccttccataaaagtgccgcggcaccttccggagaaataacagaataagtagagttttccagcatatgcaaatgattgcctacacccagaccaagggctccgccgcttccgccttcaccgatgacgatacagataacaggcactcgaaggccggccatctcaaacaggtttttggcaatagcttcactttgtcctctttcttcagctgctcgtccagggtatgcccccttcgtatcaataaaacagataattggtctgttaaatttgtcagcctgtttcatcagacgaagcgcttttctgtagccttcaggatgcggcatcccaaaattgcggactaggttttccttcgtgtctttgccgcgctgatgcccgattaccgttacagggaggccgtggaacttcgcaatcccgccgacaatggcttcatcgtccccgtacgctctgtctccgtgacattcaaaaaagtcggtaaacaggtgttcgatataatcaagagttgtcggacggtccgccagacgcgcgatttgaacccggtcccatggcttcagatttttgtaaatatcatcctgaagcttagcgagacggtcttcgagccgttcgatttccgcacttagatccatatcggaatcttgggtgaatttttttagttcggcgattttggtttgcagttcaatcaccggtttttcaaattctaatcttggagccactcaatgtcacctcctgtttgatgcatatccagcagattttctaacgtttttttcatatcgtcacgatgaataaccgcatcaagctgtccatgttttaataaaaattcagccgtttggaagtcctcaggcagtttttctcctattgtctgttcaataatccgtcttccggcaaaaccgatcagcgcgccaggctcagcgaaattgtaatcgccaagggatgcaaagcttgctgatacgcccccggtagtcggatgcgtcattactgaaataataagaccctgttcttcactgaacagttttaacgcagagcttgtcttagccatctgcatcaaacttaatacgccttcctgcattctagcgccgcctgaagccgtaaaaataataaacggaactttatcagcttttgctttttcaatcgcaagcgtgattttttcaccgacgactgaacccatgctgcccattctgaatgaagagtccatgacggcgactacagccgggtgtccgccgatggtgcccttgcctgtcacaacagcctcgtttaaggatgttttctcgcgatctttttcaagcttttccagatatcccgggaaaccaagcggattttccgagagcattccctgattgaattcctcaaaggatttttcatccatcaagctttcgatacgctgttttgcgttcattgggaaatgataatcgcagttcatgcatacccgcatatttttatccaactctttagtgagcatgatttttttacacttaggacattttgtcataatgccttccggaacatcgtgcttcgcttgatcagatggtacggaagcatactttttctttttcgtgaatatatcctttaacaaatgattacctcccttttgtgaagggttctcttcaccgcatgtcatcaaacagatagacttgctaataactttaccgaaactattgtactttttttgtcaaacgctgtcatcctcaattcgacaactttttattcgatgacgtgctcggaaaggcttgtatgaaatcagataaggtgttgaaacgacaaggttgacagcgcattcaaaaataatgttaaacccggctgaaatttttttaaggctaaccccctaaaaaaatttcagccgtcagtttaacttgagaacagcgcgccggtctccgccaacgcgctgccatttttggaatgaattaaaattattcaccaataatcgtaagttttcttgttttttctgcgacttcctcagggtcaacagtgattcttgcaacacctgtttccatcgcagcttttgccacagccttcgcaacagcaggcgcaacacgtttatcaaacggtgcagggatgacataatctgcgctaagctcatcttctgaaaccagtgaagcaatggcttcaaccgctgcgattttcatttcctcgttaatatgagtggcacgcacatcaagtgctccgcggaaaataccagggaatgcaagaacattgtttacttggttcgggaagtcagaacggccagttccgataacgcttgctccggcttcacgcgcatcttccggcatgatttccggatttggatttgccattgcaaagataatcggatcttttgccatgctttgaaccatttcttttgttaacgcgcctgctacagagacaccgataaatacgtcagcatcaacgatgacatctttcagagaaccgtctttgcgatcttggttcgtgaacttcgccacttcatttttgacatcgttcatgccgttcgggcgcccttcataaatggcccctttggaatcgcacatcacaatgtcgcgaacgccataatgatgaagaagcttgataatcgcaatgccagccgcacccgcgccgtttgcgacaactttaatggatgacatggattttccagacagtttcagcgcgttcacaagacctgctacggttacaatggcagtaccgtgctgatcatcatggaaaaccgggatgtttgtttcttttttgaggcgctcttcaatgataaagcagtttggcgctgcaatatcttcaaggttgacgccgccaaatgtcggttccagcaattttacagtttcaacgattttatcaacatcgtttgtgtttaaagcaatcgggaacgcatctacgcccgcaaagcttttgaaaagaactgctttcccttccataacaggaagcgccgcttcagggccgatgtttccaaggccaagcacagctgtaccgtcagttacaactgctaccatgttccccttcattgtataatcatatactttgttaatgtcttcatgaatatccttacacggttctgcaacacccggagaatacgcgaggcttaaatctttcgcatttctgacctctacttttgatttagactccagtttcccctggttgactttatgcaggtgtaatgcttcttctcttaatgacattctcctaaacactccttatggatattttttgattcgtatactgctgcgttgattgctgcattctgcggagtaaatctatctgaatatttaaacaggatcacataattgctccaattgtataacaaaaagcgaatcgttaccactgttttaaaacgacgtttttttgacccaacagctcttttaagcgatataacacctggtgatctgcattgatatggaacgactcaggtagcttaatcgtctgtttttgcctttcataatagagataaacgcctgtttcccctttatgctccagcaaaatgcgcttaatctttgccaggatctcctggctgtgctgactgctttctatttttatataaaccgatggcgctttttctgcatccatatcttctaataattctgcccgggacatgatgaattggatcttatcttgtctaacttcacatttccccgcagtgaacaaaagagcgccttctcttaaaacgggagaaagctgtctgaattgttcagggaagactacggcttctatctcgccggtttcatcactgagcgttaaaaacgccatgttttgacctgttttcgtccgaatcgttttgatcttcgacagcagaacgcctagtgaaagctgccttttgactgcccgctgagcctgcagaatagagactgctccttgcgcagtgagctgttttcggaaggcggagaggggatgatttgaaaaataaatgccaagcgtttccttttcaaacgcaagtaaatccaccagaggaagctcctccgtctccacatacttcggcttaattgaaaacgattcatctaaaaacaatcccatttggtcatcgtccgcggcgaatagctcagcatgttccaaagcaacatcaatggatgcgagcagcgtggcccggttttggccgaattcgtccatcgcaccagaaaagataagtgcttcaagcattttgcgatttacgctttttgacggcacgcgaaagcagaaatcgaaaagatcttcaaatggtttctcttttcttgctttatatatatctttgactgctgagacgcctacactttttatcgcgcggaggctgtatctgacagatccgttttcaactgtaaacggaaaactgcttttattcactgacggaggaaggatacgaatcccgctcccctttgcttcgtaaagatattgagagattttatcctcattgccaatgacgcttgtcagcaatccgcacataaaatataacggataatgagctttcaaatacgcaagctggcacccgatcatgctgtatgccaccgcatggcttctgttaaagccatagtttgcgaatttgacgattaaatcgtagacctcatttgcagtgtctacagaatactccttttttaagcacccttcaacaaaatggcttcgctctctgtccaggatttcttttttctttttgctgaccgcccttctcaataggtccgcttcgcctaaagaaaaccccgccatacgggaagcaatcatcataatttgttcctgatacacaatgacgccatatgtatcttccaaaatgctccttaaatcttcatgaggatagtgaacaggcgcccggccgtgtttacggtcgataaataacggaatattttccatcggacccggccggtacagtgcattgaccgccacaatatcttctaggcccgaaggtttcagccgtttcaagacgcttctcatccctgcagattcaagctggaaaatgcctgtcgtatccccttttgacagcaaggagaacgttttgtcatcgctgtaggaaatacttgaaaggtctattttaatattttcttctttttcaatcattgaagtgatggattcaataagtgtcagattcctcaaacctaagaaatccatttttaaaaggcccaagtcttcaagatggtccatcgcgtattgcgttaaatagatcccttcatgcccttcttgaagcggaacaacatctgttaacggttcttcactcaggacaacgcccgctgcgtgggttgatgcatgccttggcagcccttctattttccgggcaattgaatagacttgctgaagcaggcttgactcccgaagccgcttatccagctgcggtgactgctgtctcgcttcatccagcgtcattcccggtcttgaaggaatgagttttgcaagctgatctgcctccttcgggctgacgccgaatactctgccgacgtcccggagcgccgcctttgccgcaagtgttccaaaggtgataatctgtgcgacgtgcattgcaccgtatttctgctgaacatattgaatgacttcatcccttctagtatcgggaaagtcaatatcaatatccggcatgctgacgcgttcgggatttaaaaatctttcaaacagaaggtgatgcttaatcgggtcaacatctgtgatatacagcacgtatgccacaagagaacccgccgcagaaccccttcccggtcctgtaacaatccctttttcatgggcgtgcttcataaaatcccacacgatcagaaagtaatcgctgaacttcatccgcttgatgacatcaagctcatattgaagacggcgaaggtatcgttcatcaggcttgccgaaacggctgcggagtccctccatacagatatccgttaaataatcatcagcggacgttccgtctggggtcggaaaagacggtagacgggtctgcccgagactgacgtcaatgcggcattgttccgcgatctctacagaagcttgcagtgcctcgggatgctctcgataaatgttttgcatttcttcgtgtggtttcaaatcgagatcaggcaaatcttcagcgggtgcatccgtcagtttttcccccgctttaatcgctttcaaacaacggtaggcagccttatcttccttccttatgtaatgcacatcgcctgtggccgtaacagggatacccgtttcttctgacagctttagaatctgctcagacaagacttgattccctttaaaaggctgataggagaaataaaaagctccctttccgaatatagactgaaattccagcgaggcttgagcagcctgttcgaacagtcctccttcaagaagcgtttcaatatatcctttttcgccgggcgttattgcgataatcccttctcgataactgtgaagccatttcggcttcagtccgccttttgatttagattgcagaacgctgctgattttcagcaggttttgatagcctgtatttgattttgccagcaggacgagcgggtatgcttcaagttcgctgtcatctgtaaaaacagaagccgtcaaaccgattattgggttgatccctctcgtcttgcaagctttgtaaaattgaatagctccgtacatgacatgatcatctgtcagcgccaaagacgcatatccgagcctgtcagcttcactgacgagctcttccacagccgcggcgctgtttagcaggctatacccgctatgcacttgcaggtgaacaaaagacatgctatcacctctttctcattacgattcatttcttccctcattataaggccggtttccaaaagaaacaaatgttcttttttgactcatcatcatacttgtcctgaaagctcaatatgatataaaaggtgaggtgataaagatggatcaggaagcaggatttatggtgaattttatcaatagctacttcattgcgttaggggtgctgatcgggggcgcactcattggagggctcggagcatatttggcaggcgaacccccgcttacagccattacaaagcttgccaaccggttaaaaatatgggcgcttgtcgcagctatcggaggcacctttgatgcggtatacagctttgaacgcggcatactcgaaggcaatacgagagatatctttaaacagcttcttttaattatttcggccatggggggcgcgcaaagcggctggcttattatatcatggctgacccaggagcatctttcttcatgagggtcccccagcattacaaaaaaccgggatggcagcgttttttcgcgggaatgatgtgcggagccgtaatcagctggttctttttcctgtttacttacggaacattccaagaggagcaggtcagcctcatcgaaaagcaaaaagagcatgtaaaagacttgaacaatcaaatttcgatctatcaggaagacctccataaactgaatgaagataataaaagaaaactgctgattcaaagcgtcagcgtcaaattgctgaatggggataaatataaaatatcacagccggataaaacgaaattcgaggagcatgtaaaggatgatatttcagaggtgattacaaaagacatagagagcgtctatcaaacaaaggatctcttgaagcggacaattgaaaataaagtctatatgatcaatgaaaaaaaatacgaggcaaccgtcagagaattgattatttatacgaggctgacagtggaacttgaaatatctttcgccacataattatggatttttttcaaattctccaaacttctgtcgctttttcccattcttttttataaactatatgtgaggcttaatggcgaaaggaaggaggaagggaaatggaggtttacagtgaccgtcagttagcaaaagatcaagcagcccgtctcagacaaggtttttctgcatatgccgaaacaaactcactcgcttccctcatcaaaaaagaacttcaatcacacaatctccaagtctacgaggaccttactgatttcggctgctggttcatccccgtcacagatgaacactaagagagagggtctcccctctactcgtgttctttacataatgtttccagatcagctaaaatccgatcagcttcatcccagctgtaaatagaggcgcctgaagctaacggatgccctccgccgttatatttccgggcaagtccgttaatgacaggccccttcgaacggaatctgactctgatttgatcgtcttcttctacgaaaaacacccaggcgcgaatacctgagatattgccaagcgtcccgacaagctgtgacgcttcagaagccgttgtgccgaatttttcaagcgtatcctttttgatgaaaacagaagcggccccgttttcggacaaagacacattttgaaagataaagccgttaagcttcaccacattcagttttgtttcatacaattgattaaacaactctgaggaagagaatggatactgaatgagctcgcctgcatattttaatgttttttccgtggtattcggaaataaaaagcgtccggtatctccaacaatgccggcgtagatcagctctgccgctttcgtattcagcttccagccgtgctcttttccttctaaatacagctcgtaaatcatttcacttactgagctggcgcttgtatcgacccagagaaggtcaccgtatggatcttcgttcggatggtggtcgattttcattagtttggcgcctgaaggataacgctgatcgtctattctttcctgatttgccgtatcgcagacaatgacaagtgcgccttcatatgtttcattgtccacctcatcaagggaatataagaaagagagggacggttcaggcgtgccgaccgcaaaaatatttttttcaggatatgtttcacgcaggatttccgtaagcccgcactgtgatccgtaggcatccggatcaggacgcacatgtctatgtaagataatcgtgtcatataatgatatggttctgatcaattctgttttcatttgatactcctttattgtttttattcattaaatcacattctctgccgacggaaaagaaaaataacgtcaaaaccaagcccgtttttgtataaaatgggtttgtaaacttttacgatggaggatttcatttatgctggttcttgtttttttgattgggctttccgcctgcttttatgtgtactataaagtaaaaggcgtacgggcaaagccatctttggcaaaagaaatatgttcagcaaaatcaagcatggccttagggtcactagtcctgttctacgggctcaaccaaatgatattattccattcagtattaacgttaataatcggcggtatctttatcgtcataggagcaggaagcgcttgggcaggttataaagcctttaggcattacaatccccttcacgccaaagaagctgaaagagatcacgcgtaaggggcgcctgaacgtcccttagcttctttccatcagctgaaccatcagcatcgctttagacacgatatgaccttggctgtgcacttccacttccattttcccgaactttctgccagcctccaagatgcgaggtttgacttcgatgactgattccatctgcacaggcttcaaaaagaagatggtgatgctctctatgacgagttcgccgcgttttttcgagcgcaaaaatcggtttgccgcttgcgtcaaaatggtcgtaaatacgccataagaaatggttccaagctgatttgtcatttgcggcgtgacttcatactcgtaaaccgtttgatcttctttatcatcaccctcatctttaaacccccttgaaacgatatcatcaagcttctccccgacctgcggctgcttttgaatcatttgaagagctttcaatacgtcttggcggctgatcatgccgatgagtttttggtggccgtcagtgacgggaagcacttcgatcccttcccataccatcatttgcgcagctgaagcgacagatgttttcccaataaccgtgacgggatttttggtcataactttttctatagatgcatttcggtcatggccagcaatatcttttgatgtcagaatgccatggattttcatttgatcgtcgacaaccgggaagcggccgtgccccgtttcaaaatttttctcataccatttttcaagtttatccttaggcgaaagatataccgtgcggtcagcaggtgttaggatgtcctccaccaaaacaatttcttttttgatcagctggtcatatattgcccggttaatcatcgcggcaactgtaaaggtgtcatagctcgtggataaaatcggcagttcaagctcatctgccagctgcacaatgctgtcatccgtgttaaagcccccggtcaccaatacggccgcgcccgcttcaagcgcctgcctgtgtgcattgattctgtttccgacaatcaaaagattccccgctgcggtgtaacgcatcatcgcgtcaagctccatcgcgccgatgacgaatttattcaatgtcttatggagccctgccctgcctccgagcacttgtccgtctataacatttacaacctctgcataggtaagcttttcaatgttctcttttttcttttgttcaattctgattgtgcccacacgttcaatcgtgctgacaaaccctttattctctgcttccttgatcgctctgtacgcggttccttcgcttactttcatttcctttgcaattcttcggacagaaattttttcaccgacaggcagtgaatcgatatacgttaaaatttgttcatgcttcgttgccaagcctttcacctctaaggacagtcttcttgtttttattataaggtttcaaaggatttatacgcaatgaggctggaaaataaaaaagaagcccgaccggcttcttacagcgttgatttcgtcccagtcaagcgcaaggaccccgtggctccttttacatcgtaaagcggaaaaacctttatttttcttttaaatggacatcaaccgctgtcttaacaatatttcgattccctattttagataaaacaaataaaactgcaaatagccatatcgcccctatggccgtatagatcaatggataaacagctttgtttgcgatccattcatttattaatgttctggcatttaccagaataataaatcctcctacaagcacacccatcaattgcggatgaaacttctgcaccagccatgctgcgataggggcagcgataattccgccggccattagtgaaaacacccataaccaattgacgtcctcccatcctaatgaaataagaaaaccggcggttgcagatacggcgatggcaaattcacttgtgtctacagtcccgacaactttcctcgggctcaagcctttgcgggataataaaatcggagtggtcaccggtccccagccgcctccgcctgtggcatctgcaaaaccagcgatcactcccaatgggatggattgttttcggtttaacggcacatgcttcttctcaagagccggcttatattgaaataaaaacctgatcaatacatatccgcccagaaggagcaaaaacaaagaaatatagggtttcgccacatctccaggtaattggctgaggaatgccgcgcctaaaaaagcgcctatagagccgggaatgacaagctgataaacggtttgtttgtcaacattgccaaatttaatatgcgacactcccgatgcggcagtcgttacgacttccgctaaatggacagaagccgaagccacagcaggtgtgatgccaaacgccaataacaaagaagttgaggtaaccccataagccatacctaacgaaccgtctattaactgcgacaataaaccaataaatgcaaaaacgattaatttcttcatcagaacaccccatctatatcaatcagatatttttgactcttcattcgaatctaacaatctcttggcgctttcatataaaaaataagaggctttgataatggcagtttcatcaattgtaaatgcagggtggtgccaatcatgatcaccgtctgttccaaaaaacgcaaaggatcccggaatatgctcaagataataagcaaaatcttcccccgcggttgatgggtcgggatcaatgacttgaagtttcgctttatgcgcagcgtctcgcaccagccccgtaattgcctcatcattacaaagcggcggcggtccggaatgccacttcacatttgcctttaacgagaatgcggcagaaatctgctctgcgactgccaaaaaacgctgtttcacttgatcacgaacctctgaatcaaatgtacgaacagtgccctcaatgacaactgtatccggaatgacattccaagtgctgccgccgttgattttccctacggttaaaatcgcgctttgcagcgggtttacatttctgcttacaatcgtttgcagggcgacaataagctgagaggcgccgacaattggatcaaaaccattatgcggcaatgctgcatgagcacctttcccttctatctttactttaaatcggtcaacagcagccataagcgggcctgtttttaaccctacagtcccaaccgcgatatccggtttattgtgaagtccaataaccgcatcaatgccatccagttggccgtcctctatcacttttgcagcgcctgcacccgcttcctctgccggctgaaataataaacgaacctttcctttcagactgtcttgattttccttcaataaaaagaccgcaccaagaagcgctgccgtatgaaaatcatgaccgcacgcatgcatgatccctttatgtttagacgcataaggcaatcctgttttttcttcaattggcaaggcgtcaatatcagccctcaaagcaatcgccggaccttctgactcccctgctatgtctgcgaacacacccgtttttagagcagtagggcgaatctgtatccccttttctttaaggcatttttttataaaagcagttgtttcaaattcttcttttgacagttcaggatattggtgcaggtgccggcgaatgccgatgagctgcttttctagcgttgagagatttacgggattatactcccctttcaacttcaggatgtcatttcctgtagtctgatatggataggagccttctatatttctccaataatccaaagacatatgtaccgctcctttccctatcccaatatattttcttcagactcttcaacataagatgaaataaatcggttcaatttatcagcaagaccgcccgccccaaatcttatatacttgctggaaactttcggattatcttctttcaaaaaacttaaaaaagataaaatataaatgcgcctgtaagctacttgtgtaattccgtactcaaaaaaccagttatcaatgacattgtatacgcctcggttgacgccatataggttgttacatttcttgtaaaagcagagatccggaagatttaactcctgatgggaaagcaggctttcttttttgttcggtgccataatcccaatcagttcaaagcgttttgcaacgcaccaaatatcctttttaatttgctttgttaaagactccaaagaatcaaaccttctttcttctctaattttaaagagaatgctgcattcgattttttctccatagatgtctctatgaaagtcaaacaaaaaaatctccaatgtccttttaaggttagagcccaccgtcggtttcacaccgatattcataacccctaaatggaattggtgattgactgtcgccagaactccataaactccattacgcagcccatgcatttttgcatctacatttgccgtggggaatccaagctttctgcctaattgttttcctttcacaaccgtaccggcaatgatcgtcaaaaaagtcagcctcctctctcagcttccgcattcgatcagacgaaacctaatgatgtgatgaatgtaaaacggattgatgctgcggaatgccaagaccgagattttcccgcaatgtcccgccgcgataatcttgacgataaagccctctttcttgaagaatcggaatcaccttttctacaaaagcatcaagtgttcccggtatatccgacccaatgataaacccatccgccgcctcagcgttgaaccaagtttcaattaaggatgcgacacgctctggtgttccgatgaatagagtccgtggaaaagccatttcctgtgctacctcccgcaatgtcagatttctggcttttgcttctctcttaatccggtctgttgtgctttgaaacgcattctttcccacatcgccaatatcgggaaatggctcatccaacgggtaaacactcagatcataatcatcaaaaaaacgagccaaataagtaacagcattttcaatcggtatcaattctgcaaattcacgatacttcttttccgcctcttcttccgtatctgccacaatcgggctgatccctggaaaaatccgcacacttgaaggatcacgcccttcatcagcagctcgccttttcacatccgcataaaacgcttttgtctcttctaatgaattggaatgggtaaaaatcgcatccgcatttttggcggcaaactgccggcctgtttctgatgaacccgcttgaaacactacaggctctccctgtttagagcgcccgatattcaagggcccctctacttgaaaatactttcctttgtgattcaggcgatgaagcttctccggttcaaaaaattgccctgttttcttattgtgtataaatgcgtcatgctcccaggaattccacagcccgcgcacaacatccaaatgctcctgcgcgatttcgtaacgctcagtgtgttcaggcagattggacttactatgattgcgcgccgccccttcctgcggcgaagtaaccagattccagccggccctgcccccgctgatatggtccagcgacattaattgtctggaaatagtgaatggctcagtaaaagatgtagagaacgtccctactaaaccaatatttttggtaaccgatgccagcgcagataaaatggtgatcggttcaaaacggtttaaaaaatgaggaatcgatttttcagaaataaataagccgtctgcaatgaaaataaaactaaacaaacctttttcagctgtttgcgcctttttcatgtaaaattcaatattcgtgctggccgagggatcaacatcgggatgacgccagccgtcagttgttcccccgacaccgtgaatcatggctccaaactgaataaaatctgaacgtgtcatctttttgcctcctttatctgtgcatgattagcaagtgcaagatcaaggtgttcaatgccgatttcagttatcccttgatagtgattgccgcgcccgatttcgaccacaggcacatggcgtaccccatatttcgcctgtaaaatatctcgaagttcctctttctctgaaacatcgatattttggaacgggaaccctttttcattcaaataattcttgacttcctcacaatacgaacagccttttttactccaaaccacaatgttcaaaacatcactcattcttctgaacctccttaacgttttgcagctaaaactgcatcgctcagcagctgataagacagctgtttttcttcagtatttttgatcggtgtaaaaataacaaaatcattgattttgtatgtgcctgataaacgtgttaattcttctgccacttcttcctttgttccggcaataatcccggttttttgcacgatgatgtcatagggctctgtgacgttttccagataggcctcagcctgttcgcgggaaccgacgttgaccttacgcccgtctttcaaatccacttttatcgattcacgcgacacaatatgtttttccgcttcttcttttgtatgtgccgcaaaaacagcgggggcaagatgaaattcagcctcagatcctggcgggagatgcgcgtcaaatgctcggcgggcttccttcagcacttcctcttcaccgttaataaagtaagcaaagacaaaagagattcccagttttgcagccgaaatggcactctctgcgcttcctcccaatagaaaaatacccggcttctgatcaacctgcggcctaggacgcaatgcggcatagcggtgggtatcaggaaaatcatcccgaacgaaatgagtaagctcctccagtttttcatcaaactgacgcaccggttttttatattcggcctgcagcgcgtctgtggacagctgaaacccgccgggcgctttgcccactccaagatctatacggccgggagctaacgctgatagaagatggaattgctccgctactttataagagctgtaatgctgcagcatcactccgcctgatgctaaacgaatttttcttgtgcttgcagcaagatagcctaaaagaacctcgggtgcagaccctgcaatctcatcattgttgtgatgttcggccacccaaaatcggtgatatccacactcttcagccatttgtgccaagttcactgtatgctgtaatgtatcagctgctgtctccccttcaccaatcaagctttggtctaaaatacttaagcggatcatatcaccggctcctttatgtgttcttttggttcaaataaatattccggcgaaacacggcggagaaactgcctcgttctgtcttttttggtatggcgaaagacttcctccggggttccttgttcaacaatgactccttcatccataaaaacaacttgatcagagactcttcttgcaaactccatttcatgtgtaacaacaatcatggtggctccggttttcacgatttccagcattacctcaagcacttcaccgaccagctccggatcaagcgctgccgtgggctcatcgaacagcagcacatcaggatgaatggcaagcgcccttgctatccctaccctctgcttttgtcctcccgataactgactcggataagcgttcaatttatcttgaagcccgacctttctcagttcattttccgctacggcatacgcgtcttgttttctcattttccgggcaatcgtcaagccctccatgacattttcaatcaccgttttgtgagcaaacaggtggtattgctgaaataccattgccgtctgttttctgagccagtgaacctcttttttggacggaaagctgcaattaatcactttgtcatgtatagaaatgatcccttcgtctggacgttctaataaattcaggcaccgtaaaaaggtggttttccctgatccgctcggcccgataatcgtcacaacttctcccttgcgtaccgtgagatttatcccttttaatacatggtggatgccaaactgtttatggatatttttaatctcaatcataaagtgcctccttgaaatctggctgcctttctctctaatactccatttgcggattctaggattagagtcagcacccaatagataatcgctgctccgataaacgcttctaaaaatgcataattatcagaagcaacgatagtcgccgtccctgtaatctctgggacagccactatagccgcgatagaggtggtatgcaaaaagccgatacccaaatttgtgaagtttgggatggaaaccatcagcgcctgcggcaatattacacgccgaaaggtttggctgtgtgtcaagccgattgaataagccgcttcgacctgtccggtatccatcgccagaatgcctgaccggatgatttctgtgagataagctccggcagttaaagacaaggccatgatgacaaacatggagaccggtatctcattggcggaccagccgagatgaaaaaaactgctgacttgatctgcaacaggaggtatccctaaataaatcaacataatgtgaaggattgcaggtgtacttcgaaagaaagacacataaaaccttgagcaagccaccaagcccttaattctaaaaattctaacaattatatttccaagagccacgagaaatccaaacacaatcggcaaaacagccatcatcaatgtcagaggaatggtctttaccatttctttcatggcggaaacgataaatggaaagtcaaattgcaatcttctcccccctcatccgaagaaatatatcaatgtatgttcatgtcaaaaacagtaacaatccttgtttgattcttcttgattcgtttttctgccactcgaaagaaccattcgaataaaactgcaacagcataataaacaatcgatagcgcaatgtaaacttcaagagaatggttgcttgaggtaatcagtgtttggccccttccggacatatccataacacctattgaaaaagctagagatgtatcttttaaagaactgatcaccatgtttcccatattcggaaatgcctggacaagtgcctggggcagaacgattcgcctgaaggcctgactaccgcttaagccaatactgtacgccgcttccgtttggcctttatctacactgcccacccccgctcgaatgatttctgcggctgccgctgcattgcttaacgcgtaggttgcgacagcagcataaaacgggtccatttttgatgtatcaatcccgataagtcccgtaagcgccgggattccgtaaaacacgatgaaaagctgcaccatgataggcgttcccctgaaaaatgagatatacacttttgccaattgatttacaattggaatattgtagatgcggggcagtgccagaaagagtcctaatacaaaaccgaaaagcaaggacagtgttaaaatgtataatgtaaccggtaaataagcggttaacgtcggcacaaaatctccaatcatgttcatatcaaacgctttttccatcactgctccctctcttttcacctaatactgctctttggaatagtcgtcaccaagccattttaaactgagttttttcagcgttccgtcatcaatgatttcctgtaaggctttatcaatatcgtcacttaacgtttgttcatttttgttaaacataaaatacactttggcatttgaaagcacatgaccgacggttttttctttaatagcgctcgtcttgttttgaaagtctactgcaaaaggcgttgagatcgttgcgtccgcacgccccgatttcagctgattcgcagtctcatttgcgccttggccctcataggcaatctcaaacggccgtccattatcctcattccattttttcagtacaagcgctccgttggaggttgcactcgtaatcacccgttttccttttaagtcttcaattccacggatcgtatcgttattttgaagcacagtaatttttaaaggaaaatggttgtaagcaaccttgttaaacagaaattttttctcacgctctttgcttttctccatttgatgtgccacgatatcgactttatgctgtccgaggctgacaagcaggttggaaaattccatcgttttaaatgtgaatttataatgtggcaggcgcttatcaagctctttgatcagttcgacatcataaccggttaaatcgcctttttcatcaataaagcaaatattcggaaattgggttccagttccgaccgtgatcgtctgtaccttcttttgcccggctcccgtcgtttgactgcctgcaccgcaagctgacagaactgttataagcgaaaataatattgccatgaatgctgttttcgttttcatctcatcgccccatttatttttcaaaacttgattttgaataatctgccccgagccattttcggcttagtttttttagcgttccgtttttctccagctttttaatcgcttgatccgtgtcatccgccaaggtttggctgcctttattaaacataaagtacacctcggtatctaataacacgtcaccgactgtcttttggcggaaggcgtgcgttttattctgaaaatcgacggcaatcggtgtagctatcgttgcatctgcgcgcccggtttcaatttgattggcggtatcattgcttccctgtcccgcatatttcaaatgaattgggctgccgtgcgttttgttgtactttgtaatataatctgccgcatttgacgtggcgccaactatgactgtttttccgtgtaagtcttttaatgtatgaatcttgtgattatcctctttcaccgtgatgtacatcggcgagtagttatatgggactttatgatacaaaaaacgcttttctcgttctttatttttggccatattgtgcgcaatcacatcaatttttttatttccgagactcgtcagcaaatttgagaaatccatcgttttaaattcaaatgtatattgaggcaactccttatcgatggctttcatcacttcaatgtcatacccggtcaattcacctttttcatttaaaaacgcaatattcggaaaatctgttccagtgccgactatgaccgtttgagcctgacgatctgttttgttatttgtttgcgaacatcccccgccaagtaatgcaaacactgacagcagcaaaaccaatcctttacgcttattcataggctgcctcacatcatgcccagctgggcgcacctaaaagcgttgggttaaatcgttccggaatcagaaccttgtgcatcatcacacctatgtccccgtctttttcctgctcaaaatacacttcataccctctccttctgtacatgtcagcaagccaaggatgcttgcgcgccgatgtgccgagtgtcagcgcaggagccttcagcatatctcgaagcactttttcttcaacatacgtaagcagcttacttccggcgccttgccctttatattccggcagtgtcgcaaaccaccacacaaatggatattttgaaggaggcgtctcactctcccacgggaacctgattgtaatcgttgaaatcagcttcccatcccgctccagcacaatcgctgaatgatgttcaatattttctgataccatttggatatcagctctcgtggatggccaatcaatatccagctgccgaatgggctgaaatgcgctgttaaccagtttcaacagctccgatgcatcttcaacagttgccagtcgaaaaatatcatcactcatttttgtcactcctcttcacaatatatataattcctatttgtttactaatcttttattgtttatactataaagcatactctgatctttgactaatcaaaaaaagtaaaccttcacttcagtaattttaatgatgaaaaacaggagggagaacattggagttacgctcaatcaaaacgtttcatacgattgtaaaatttggaagcttctataaagctgcagaaatactcaactactcgcagccgacgatatcgatgcgtatgaagcaattggagcaggatttaggcgtactgctgtttgaaagaggaaaaagcctgcagctgacaaaagcagggaaacttttttatgaacgaacaggagatcttttgatgcaatacgaggcgcttaaacacaacctctccgacttaaaggaagaagaggcaggcattatcaacataggggtttcagagccaaccgccagtctgatattccccgagattttaaaggatttcttaaaggattacccaaagataacagttaatatcaaggttgatgacgccaatacctgcagtcaaaagctcttagacgggacgattgattttgcagtctgcggcgagccggagctgattcttgaaaattactaccatccatttttttatgacacattaaatgtgattgtatctgagcaacatccgctcgctgagaagaaggctgtccatttgtctgatttagcagaagagcgcttcatatttacgcccgccaattgccccattcgcttacaaattgaacagcatttacatagagaactcgggaatcgttacaaaaaaatggagctcacaagcagcatgtcacatgaatattacgtacgtgaaaacatcggaatttcaatctttaccagcaccgcacattctaaaccgttcaacggcactaaagtcattccaattctgaacctggatatcaccccgcccatagggctgttgacaaatcaaaaagaagttcattttgaccgcgccacgaaggacttgatcgcccggataaccaaacgttttcagcagcgcagcaaagaattggaaggaacctctgataagaccattacaggataactgaaaaaataaaaaccacctcctgattcatcaggagatggtttcacggtttaaagctcgatcgtctcaccgaccgacatgactttgccgactccgcccggcaggctgtcagcgaatgcttctgggtcttgttcgatgaccgggaatgtattgtaatgcaccggcacgacctgttttgcgcgcagccattcagcagcaagcttggcgtcttcaggccccattgtaaagttatcgccaatcggaaggaaagcaaggtcgatatgattcaattcgccaatgagtttcatatcagagaaaagtgccgtatcgcccgcgtggaaaatcgttttatcttctacagtcagcaaaataccggcaggcatgcctgtgtaagtgatcgttttgttttcttcatctgtgatggctgatccatgaaaggcctgtgtgagcttcacttttccaaaatcgaactggcgggagccgccaatatgcattggatgaacattcaagcctttccagcctaagtacacagcgagctcgttcggggctataaccaacgcgttattttgcttggcgatttgttcagtatcaccgacatggtcattgtggccgtgcgttaataagatgacatccgcttttacatcctccggctttatatccgttaatgaattccctgttaaaaacggatcaaaaataatatgatggtccttcgtttccactgtgattacagaatgtccgtgatatgtcactttcatttctttcacctcgtcacatgattttgatttttttattttccctttttaaaaagctgaaaaacttatgttgtttgattcttgttaatgacattgaggccaccggtggcttcaatgacagtccctgtcacaaggtctgagttctcctcacacaagaaagcgataatccgggcgatatcctcgcctgtaccggatcttcctatcggcgttttttctttgccgattcgcattctggcttcctctatcgatgcttctttcatgtcgccgacaatgtctcccgggcaaaccatgttggcggttatgccgaattcggcttcttcaatggcaattgtcttcgtcaaagaagccaagcccactttcgcagcgccaaatgccgatcggtgaagccagccgggcgcgtgagccgcaccttggaatccgtacgtaatgatgcgtccaaattgctgttttctcataataggaataaccgctttgaataaatgaaagacggcgcttaaatttccttccagcatgccataccattcatcatcagtataatcggctaactttttacgttcaaatatgtatggtcccgcgttgttaatcaaaaagtcgatccttccgaagcggtttaaggcagcctctgcaatacgcagcagatcttcttttttggtgacatcaccttttacaaattgcagccggtcaagacaatcgggacaggcttccttcaggcggctgactgcctcctcatcctgtctgtaattgactgttactgaatacccctttgcaagcaacgtttcagtcactttgcggcctaaacccttcgaaccggcagtaattaaagcatgtcgcacatgaatacctcccaaagcaacgtcgccgctttcaataaagtgtttcttcttctactttactataaaaggcttgcaatatcactttttacactttggcatacaaaaaaagctgcctgtacagacagcttattctgcaggagatgaagactcctgatcaggcatatcgacataaccgctttgatatgcttctgaaatgagccttgttgtctcctggctttcttgttcatcataaatatagcgttccggttcttttttcatcattctgcctcccatcattatagaggtaggttggctataatgacgggattttatgaaggaaattttaacaaactcctgctgctacgcaagctttcgctttttcaagcgcctgctttacctgtttgaatccggtgcccccggcgctcattcttttttcaactgcgtagtaagggtctaacacagtgtaaatatcttcttcgaatagtgtgctcgcctgctgaaactcgccaaacggcatatcgcttaaatagatccctctttcgatgcatgtgtacacaagtttcccgaccacttcatgcgcttctctgaacggcattccctttttagctaaataatccgccagttccgtcgcatttgaaaagtcttgttttgttgcttgcttcatgacgtctttgtttacagtcattgtttggatcatgcctgtgaagatttgcaggctgccctccaccgttttcaccgtgtcaaacatgccctctttgtcttcctgcagatctttgttgtaagcgagcggaagtcctttcatgatcgtaaacagccccatcatatcaccgtatacgcgtcctgttttgccgcggatcagctccgccatatcagggtttttcttttgcggcatcatgctgcttcctgttgcgtacgtatcgtcaagctcgatgaatttaaactcctgcgagcaccataaaatgatttcttcagagaaacgggataggtgcatcatcagcatactgctgttgcttaaaaactccaaaatgaagtctctgtcgctgacgccgtccaagctgttttcataaatggcatcaaagccgagcagttccgctgaataatcacggtcaattgggaaggttgttcccgcgagcgccccgcagccgagcggagatttgttaatccgcttcattgaatcctgaaaacgctccttgtcgcgctcaagcatccagaaatacgcaagcatatggtgagcgaatgaaatcggctgggcgcgctgcagatgtgtgtagcccggcagaatcgtttcaacgttcgcttccgccttttcaatcagcgcactttggaatgcctcaatcagctcgatgatgtggccgacatgattcttcaagtataaatgcatgtcagtcgccacctggtcattccggcttctgccggtatgcagcttgccgccaagaggaccgatttcgtcaatgagcattttctcaatgttcaaatgaatatcctcataatcgactgagaattccaatgctccctcctctgctttttgcaaaagggtattcaggccctctcggattttcaactcttcttctgctgtcagaataccgcattttttcagcatggcagcatgtgcgagagaccctgtaatgtcttcagcaactaaattttggtcaaatgatatggacgcgccgaactcgtcgacccatttttccggtgttttttgaaatcggcctccccagagcttcttcatgctttaatctgctccttcttttttacgatgctgttcacttttgtcggaagtccccaaagctcgataaatccaattgctgcatggtgatcaaatgcatcgtcttttgtatatgttgcaagtttttcatcatatagagagtattctgatttacgtccttctacaattgcatggcctttaaacagcttcacgcggacaatgcctgtgacatgcttttgcgtttcttttaagaaagcgtgcagcgcatcttttaacggcgagaaccataagccgttgtaaatgatctctgacattttttgctcgatgatcggtttaaagtgggctacctctttcaccagtgtcaaatcttctaattctttatgcgctttgatcagtgtcatcgcaccagggcattcgtatacttcccgggatttaatgccgacgaggcggttttccacgtggtcgatacgtccgacaccgtgcgcgcccgccatttcattcagcttcaagatcagctcagaaagcgagtaggaaacaccgtcaatggagacaggcacgccctgttcaaatgcaatttcaatcacttccggcgtgtccggcgttttttccagcggagctgttaaatcgtatgcaccttctggcggcgccgcccatggatcttctaaaatgccgcactcattggcgcgtccccagaggttttgatcgatagaatacgggctgtcaagattgatcggaatcggaatgccgcggctagccgcatattcaatttcttcttcacgtgaccactgccattcgcgaaccggcgcgatgacttctaggtcagggtttaatgatttaatggagacttcgaaacgaacctggtcatttcctttcccagtgcatccatgggcaatcgcctgtgcatcttctttttccgctatttcaaccagctttttcgcgatcagcggccgagataatgccgaaacgagcgggtattttccttcatacatcgtgtgggcctgcaaagaaataagcgcgtaatcctgtgcaaattcttcttttgcatcgatcacgtaggagtttgtcgcgccgacttcaagcgctttctgctgaacaaatgccaaatctttgccctcaccgacatccaggcagcaggcgatgacattatatccttgctcctgaagccattttattgcgacggaagtatcaagaccccctgagtatgctaatacgacttttttctgttctgacatgataaaaatcccctctcaaccgtgtttctattttgtataaaaataaattatatttaataaaaatacattttgtatgtatacactttaacaagtacgtttcgttttttcaagccttttacaaaaaaaacttcacctaaatttcaggtgaagtttcgtagtatttattcatttacttgtcttttctgatttctctgaccacatgtgcaagttcgggaataatcagcttattcattgccagctttaccgcgccgcttgagcctggcgttgagaaaacagcggtatgctgaatgacgccggcagttgctctcgacatgattgcggcagggccgatatcctctgtataactcagcatcctgaatatttctccaaagccgggcagttctttcgaaaacagcggcgttatggcttcaattgtgacatcccgatctgctatgcctgtccctccgtttaagagtaccgcgtctgtctgttcatccatgcagcccgcaagcactgaccgctgcaaagcatccttttcgtcttttacaatttcatatgcggcaatatgatgaccggcttcttctaaaaatgagatcatcagcttgccgcttttatcggtttcatctgtcctcgtgtcactgacagtaatcactttgcaccgaacgatatcgggagcttcttgtttatgctcttgaacgctcattggcccacctcttttatgttttctgtctgtcactatcatgcatcaacaaaaaagcacattcaagagaatgtgctttcatgcgatttattttgctaaacgaacaacgtcgcgcgcaatcatgacttcttcatcagtcggaatgatcatgacttttactggagaatgcggatagctgatgaaagcttcctcgccgcgcacgttattaagcgcaggatcccagtatacgcccatgaattctaaaccgcgaagaacgcgttctctgacttccacactgttttcaccgataccggcagtaaagatgatcgcatcgacaccgctcattcttgcagcgtaagaaccgatgtatttgtggattctgcttgcgaatacttcaagagccgtttccgcgcgctcatttccttctttcgttgcttcaacgatgtcacgaagatcgcttgagaaaccggaaatgccgagcagtccgctttttttgtttaatgtattcagtacttcgtcagccgtttggcctgttttctccatgatgtatgggatcagggcagggtcgatgtttccagagcgtgtgcccattgctacaccggcaagcggcgtaaagcccatggatgtgtcaatagattttccgccttcaacagcggcaatacttgctccgtttccaaggtggcaggaaatcaggcgcaagtcttttaacggacggccgagaagctctgccgcacgctcagttacatatttatgtgaagtgccgtggaagccgtatttacggatgccgaatttttcatagtattcatacggcaggctgtaaaggtaagactgctcaggcattgtttggtggaatgccgtatcaaatacagctaccgcaggaacatttggaagcacttctttgaacgctttaattccaacgatatttgccggattgtgaagcggtgccaattcagaaatatcttcgatttccttaatggtttcatccgttaataaaacagaatcgctgaatttttctccgccgtgaacgacacgatggccaattccgtcaatttcattcaagtctttaataatgccgaattccgttaacttattcagcagcattttaacagctaccgcatgatccggaatatcagttacttctgtatttttttcgccgttcacagaagttgtgaatacgctgtcggcgataccgattcgttcaactaaacccttcgttaaaacggtttctgaaggcatttcgaaaagctgaaatttcaaagacgagcttcctgcgttaattgcaataattttggacatgattgacgctcctttatactctgtatcaacaacttcgtttttcgtacttttttcccggtgaatatcaacatcttctccgaaaaatatctgacttttccatttaaacattgtcatgtcggcttttcaagtcaacttgcgtattgataacgcttacaataagaagtcgttattttcagacacattccctataggttttgtattgatgaacgcttacaatttgcggtttttccctctgtattttgtgtttcaaagctggattcaattcgtcaagtccggtcttcaaaagcataaataaaagcagcttaggcatcgacctcatacggctgtctaagctgcttttaaaacacttacttttcttttttaaaccattcatcaaattgagccatcatatcaagcatcgccttttgattggagaaagacggaagattcgcaagcagaatttgccccggcgctttcgtattctctccttgtttctgaagcacaaggatgcttttggcatgagcttcgtctttaaaaatagattttggcagctgcaacagtgcgttgatatgaaccttatctttgaaaaactgtttcagcttgccgctttgggagctctcaaacaaatgattcggaatcataaaaaataagtagccgcccggtttggtatgcttgacgctctgttcaataaacagatgatgagcgaaggaatggccttcgtcagctttaagctcaaacgcttctgctccttcgtcattcggataatagccgactggcagatcacaaatgaccgtgtcaactggatcgataaacaacggctcaaggctgtcctggtggaaaagctcaagctcttttttcagaaggttcgcttgggcataggcgatcttcaagagcacatcatcaatttcaatgccaaagctgtttgccgttttttcagacagctggttcagcacggtaaacagaaggttcccagttcccaaggctggatcaagaatggtcaattcctttttgtccgccataaacttattcaccaaatagctgatgaaaagcccgatcgtatccggcgtcatttgcctgtttggatgggagatatctttcattcctttaaggacggcaagctgaaaagccttgcgtacccactcatgctcatacgtgccgaattccgctttttcaagcagagcctgaagttgtttggttttctgatcagcaggcagtttcagctgatccgttttttcaagaaaatacatttctcctgcttcggcaagcgcctctatatatgaaatctgcaattcattctttatcataatcgctgcttcgtttaacagctcatacaccgcacctacatggtctttttgcatattgtgttcctccttgccatgaaaaaagctccggcggcagcctggagcttttttccctgcttacttcactaatgccttagcagcctcaattggcttttcatagttcgggtggtttgttgcttcgcttacatattcagcgtaaacgacttttccattctcatcaaggacaaatacggaacgcgcaagcagacgaagttctttaatatacacaccgaacgctttgccaaatgacatatctctgtggtcagacagtgtttccactttgtcaattccgttagcgccgcaccagcgcgcttgcgcgaatggaaggtctgcactgattgtgtagacgttgacatctccaagctttgcagcttcttcgttaaaacgtcgtgtttgtgcatcacaaacacctgtatcaattgaagggataacagaaataatcgttacctttcctttcatgtcagctaacgatttttcttcaaggctgttagtcagcactgtgaaatcaggagcttgatctcctaccttcacttcttgtccgacaagtgtaaccggaccgcctttgaatgtaatttcagccattataattcctcccttttgtatgtatgtctctatcatagtaaagtttcctgcaaactgcaaagtttatgccaaaaaaaagttaactgcggccagcgcagttaacctttttttaataattcatattgttcatttggttttgattttggccctgactttggttcttgttatttttcttgaacatttgctggatgcgttcgagtgtttgaggggctgcgtctaaaattttctctattaaatgggtattttcatctaaatgaagcattctgatgcctgtcgatccgacaattaaaaacgcgatcggcgtaatggacacaccgcccccgcttccgcctccgaaaggaagtttctgttctcttgtctcatcgtcttccgatttcttttcggccggctttccgccaaactcgcttccgcctgcggcgaatccaaatccaactttagaaacagttaaaatcacacttccatcaggcgtttctactggatctccgatgatggtgttaacatcaatcatttccttcaagttttccattgcggttttcattaatccttggatgggatggtctgccatatacgcttcctccttaaactgatgaatcattctttgaagtcattctagccgacggattcttctttaatacggatagctcccgtccgtatttgacgaatttgaaagctgcaagcatagcatgtccaaagcgaaaaaagaatatacactgaaaatgggtcttggaagcaggggcttgaaacgacgggatcacctcatagacaggtttattcacaaagtccaggtggtcgtagagcattgctgcgataccgcccttcacgccccatacagcacctgttaacacacctgtcactgccgcgtcctgaattccgattactgtaacccattctagttttgtgatatgtaaatgcgcgagaaaagacgcgctgattttccgtagtctggtgacctgatgcaaaagcatttcgattttattaatgctttgctgcacatcgttttgtgtaatttttttctttccgctgctttttttcattttagattcagttttttgtttgatatccactgttccgtcttctttgttcaccttaatcgccgggattgtttttttgatccttataaggccaaacagcgccgtaatcttcaaggtcaatttgtcattatcagcggcatgaagatactccagcgcgacatggattttcattctgagaagcagtacgatccctatgagaataagaatggctgtcagtacatacaccatattcttcacttcctctaggagcattatcgccaattcctaaaaaaataaacccggacggaggtccgggttatcggttatttgcggtataatttttcatgcaccacggtggtatccgcgatgtaatcatgaatcccttgttttgtaggtgaaaaagcaacaacgatatataaaatccaaatcttatcaatataccgtccaaccacttcacgaaaaatcactgtactccatgtcagcttgctatcttgcttcacagaaaccactttgaggccgaacaccattttaccaagcgtctgcctgaagtatttagtcattagtgcgaagtaggcaagatacacaataagcgttgtcacactgtaggccgagaaggtaaacatgccggatgttttcggcagatccaatacggtaaagaggggagaaacgagcaaatggtttaatccccatatcacgagccaatcaagcaggaaagcccagaaacgaacccaaaagccagcataggcatgtgtcagctgctccgcttcttgcgggcctttgatgtcattgcgctctaactcttcatatgtcgcgtccattattgttccctcctacttcgcatagagatacatcattctcggcgaaccggattgcgatagaatttctctcatattcaaaaaatcaatttcacttttaaacattttgttcgcgcccatggaaaacagtgagcctaatccgaagctttcctcataagaaatgacagaggcgtttttcaaatccttgtgatcctttttcatggccgtaatggtatcgtcataaaaaccaagctcatcaacgaggttcagttttttcgcctgccgtccgtcatacacgcggccgtccgcaattttctttacctctgctttcgacatgccgcgcccttttgaaatgacatcaacaaagccttcatacgaattatcaaccatcgattgcatgatgtttttttcttctttcgtcatctcacgggaaggagacataatgtccttatgggccccgctcttaatcgtttcataagaaatgccaagcttatcggcaagctttgaataattgacgctttccataatgacgccgagtgacccggtcagggtttccggtgtcgcaaaaaccttatcagccgctgttgagatgtaatagcctcctgatgctgccatcgaacccattgacacgtaaatcggttttttcgtttctttcttgatttcttccagtttcttatgtatttcagcactttcatacactccgccacccggagaattcaccttcagaacgatacctttgaccgtcttgtcatcttttgcgcgctcaaggttttttaagaacgttctgtggttatatccgtctgcaccaagcagactgcttgagtccccattatcctgaatggtgccgctgacctctaatacggcaattttacttgagagactgccgttttccagcgtcttttcctgcgattcatccgtcagtgatgtgagatccgtttgagcgcctttgacgctttcaaagaaactcatagagatgctgacgataatagacacgccgaaaatccccagagcaatcactaatgcaatccatctttttgcattcattttttctcctcctttttcctaaactctctcattatacgattcaatatgaaaaatgtttcacttcatgagaaagctccggcttaacgggctgccggcaaacgtggtacacttatggccaaaggtattttatcacaaatactggatggcagaaaaacttaaatatgacagcaaaggggaaatgggatatgaccgatcaacgccgtaatgtttatttttttcacaaacaggatcaggaaacgaacgaacaagcccgctcgttaacacaattagcggaagagcatggatttaccgttgtgaaccagcactcagacgccaatattatcgctagcattggcggggacggcacatttttgcaggcagtcagaaagacgaattttcgtgacgactgcttgtacgtcggcattaccaaaaaggggaaagctcatttatattgcgactttcatagtgatgagcgagaaaaaatggtcgatgcaatgacgtttgaacaaattgaagtgagaaaatacccgctgattgaagtgacagtggatcaagccagtccttttcactgcttaaacgaggtatccatccgctcaagcatcatcaaaacctttgtgatggacgtgctgattgacgatctgcactttgaaacgtttagaggtgacggaatgattatctcaacgcctacagggagcaccgcctataacaagtctgttgcaggagctgttgttgatccattgcttccatgcatgcaggtatcagagcttgcatcccttaacaataatacctaccggacactcggctcgccatttgtcctcagctctgaccgaaagctgacccttcgtgtggtgcaggacggcaacgaacacccaatcatcggcttggacaatgaagcactcagcacgagaaatgtgaaaacgatcgaaatcaaactgtctaataagaaaatcaaaacagtcaaactaaaggacaattcattttgggaaaaagtgaagcgtacttttttatagaaaataaaaggacaggctgctgcctgtccttttatgatttctcatatacaatctggccgttaatcacggtttttttaatatctaaaagatgaagctgtgcggggtcaatggcaaacggatcaccactgagaactgtaaaatccgcatcatagccttccgcaatttttccgcgtgacttctctttataaatgataccggcgctaccttctgtataaagctttatcgcttcatatacaggtaaacattcactttcattatagcttggcccgttttgctcatgactgcttttcctgaggaccgcggactggatccctagaagcgggtcaacaggctcaatcggggcgtctgaaccgcccgcgcataaaatgcctttagatatgagggttttccaggcaaatgcagtcttcatccggtcttttccgagacggtcaatgacccacggaaagtcgcttgcaacgaaatgcggctgaagatcaagtgcgatcggcatgcgtgctgctctctcgattaattcgttatcaagcacttgggcatgaataagccgatcatgccggccgtttttgggcggatgcttttcaattgcgttcagcactttttcaaaagcaagatctccgattgcatgaactgcaacctccatccctttttctctcgctttgcgaatgagccggccaagggtttcatcatcgtgaacctgaacaccatttgttgatggatcatcctgatatggttctttcaataaagccgttctcccgccaagcgccccgtccgcaaagattttcatcgcaccgaactccacatacgggccggacagcttctccagctgctcccatcgatcgaccgcttcatgatgaacgagcaaatggcagcgaaacggatactttccgccagcggcagctttctcataagctttcaacggcaccgaaacatcaccataataggacaagtcttccgaatgaccgcccgtcaggccttttgtccagcaatcctttattgcagccgttaatgcctcatcaacatagtgctgagagactggcgggacagccttcagaatcaaatcctgcgccttatcaaacaggagtccggacggctctccatttgcatcttttacgatgactccgccgtcagggtcaggagtatttcttgaaattcccgctgcttgaagagccgcagaattgacagctattgcatgccggcatatacgcttgagcaagacgggtctgtctggaaacaggcgatcaagatcatgcttagtcaagtagtcaggtgtcccaaactgattttcattccagccctctccaatgagccaatcgtttttaggaagctgccgctctctttccttcgcagcctgtaaaattgaatctttcgacgtcagtgcggacagatcgagctgaagctgtttctcaccgtggccgatcaaatgtaggtggctgtcaacaaaaccggggaacatcactgcaccgttcaggctgatttcttctgtttccggtgacccgtacttttccttcaaacgttcatagctgccggtgccttttatgacaccatcctcaacataaactgcctcagtccgatcgccttcttcgagcatcgtataaatgaaaccgccgtgccatatcgccttcattcacgttcactctctttctttacgcctttttattggctttgagctgttcttcacgttttcttaattccactcgtctgatttttgcagaagccgttttcggcaggctttccacaaattcaatttctctaggatatttgtatggagcggtaatcgtcttcacatggttttgcagcattttgacaagctcatcactgcgtttttcatgattttgcaggacaacatatgcctttacgatggagcctctgatttcatcagggcttgcgacaacagcacattcttttacttctgggtgcttaacaagcgcgtcttccacctcgaaaggcccgatcgtatagccggagctgataataatatcgtcatttcggctttcaaaccagaagtaaccttcctcatcttttcttgctctgtctcccgttaggaaataatcgccgcgaatttgtgttttcattctttccggatctttaaaatactctttaaagagcgcaggcgtactgaggtgaacagcgatatcgccaacctcaccaggtttgcagatttcaccgtcttcatttatgatctccacctgatttcccggtgtcggttttcccatgcttcccggtttaataggcgtatctttcaaaacaccaaccaaaagcgtgctttctgtttggccatatccgtcccgtaccttaatgccaaagtgcttttggaaaacatcaatgacttcacggttgagcggctcacctgcggaaacagcgctgtgcagggcagaaagatcaaagcgttccaagccttcaaccttcgccattaagcggtattctgtcggagtgcagcagaaaacattgattttgtagcgatttaaaagctctagatatttttctgctttgaatctgccgtggtacacaaaaccggttgctccgctgccaagcaccgctaaaaacggactccatacccacttttgccagccaggggcagcagttgcccagacgatatccttttcagaaatgtcaagccaagcgccggcagaagtttttaaatgagcaaatgcccatccatgtgtatgtacaacacctttcggctgacctgttgtcccggatgtataagataagaaagccatatcatctcttgttgtgtcagctgttttaaattggcttccgtccgcttcaattgataagaggtttttccagccggcatcattttcaccaatagacagtgtaatcagtttgtcagtcgtactgacatcccggaaagcgccaataaattcggagtagacgatagcgccttttacctctgcatgttcaatccggtattcaagatctttcgcgcgaagcatttcggagcacggaatgacaaccattcctgatttcaggatagccaaataaacagcataggcttcaagcacccgcggaaccattacaatcagcttgtctccctttttaaatccaagatcagctaaggccgctccgattttatttgtttcttccatcagcttttcatacgaccaagattcttgcttgcccgactcgtcctcccaaagaagagcggttttttgtccagcggcactgaacttttccatttcattcactaaattatattgcataggggcaattaaatcttcacgttttaacacgaacaactcctcactttctccacccattatacataaatacaggctctttccgtaaggatatgcctaaaagcaacctctgtaaacatagattttataggccgctggtccttttttatattataaaaaatgaaaaggagtggggatacccccactcctaagccattatgtgaaattgtaaattagaattgtcctccgcccatgttttgttgagcaaaagatacaagacgttttgtgatctctcctccaacagaaccgttagcgcgagaagttgtgtctgctccaaggtttacaccgaattcagaagcgatttctaatttcatttggtcgatcgcttgagcagctcctggtactaaaaggttgttgctgttacctgagttattgttagccatgtgtctcacctccttgtgagtatagaatgtgtcaaaacacatggcttcattcagaaaaactttggtaattgtatacaggagctgaaaattgatttaaaagagttcagcgaatttatcgttagcttcttgttcgctataaagggtcattgtctcaatgttatctaccgcttcttgaatatacggctcgaaatcaacaaagctttcaaagtgttcaattttctcttttttagggcgtgttttcgggcttggcggtgtaaagatcgtgcagcagtcttcaaatggctgaatgcttgtctcatatgtgccaatttcccgtgatttttcgatgatttctgttttgtccatggcgattagcggacgcaaaatcggtgttgacgtcaccgcattaattgcatacatgctttcaagcgtttggctcgctacctgaccgaggctttctcccgtaataatggcaagcccgtttctcttttctctgattctgtcggctatctgaagcatgaggcggcgggttgccgtcattgtgtaattttcaggaatttgtttttggatgagctcttgcgtttttgtaaatggaacaatatgaagtgtcatgcttcccccaaaacgggacagacatttcgccagatccattaccttttgctttgcgcgctcgcttgtgtatggcgggctgaagaaatgaacagcttctaccgacaatccccgtttcatcgcataaaaaccggccacagggctgtcaaaaccgccagaaagcatcagcatcgcttttcctgctgaaccaactggcagcccgcctgcacctttttcatcacgaattgtcaaaaatgttgcttcttccctgatttcgattctgagcgggatgtctgggttgcgaacatcgaccgtcaatccttctgtatttcgcaaaatatggccgccgatttcagcgttcatctggtttgtatctaattcaaattgcttatacgctctctttgtcgcgactttaaacgtatcacctggtttatactgatctttgatagcctttagtgcggttgccttaatatcatcaaggcggctgtcacatttaattgccaggctgaagctttgaatcccaaacacttgctttaaatgaggaaaaagagcctcaggatcctctccatttaatgtaatcgtcatacgatccctgttggaaaagtattttaaattcggatagtctttcaaaacgagtctgatgttttgttttaagcgctcaataaagctttttctgtttttgcctttggtcgaaatttccccaaaacgaattaatatatgatcgtaattcatgttctacctcatcattttccttaattttttgataccaggacgaagcgcgttcataaacggttctgccacatcgcttgtctggctgtaatttaaactgattctgatgctgcttccggcaatctgctctcctttgcccatctctaagagaaccttgctgggcttatgttcttttgccgagcaagccgatgttgtggagacgaaaatatcctgttcctcaagcatgtgtaaaagcacttccgctttaatccccggtacagagaaattaataatgtgcggcgcgctattcatttgaggcgtgttgataacgacgccctcaatttcactcagccttttcataaacaattcctttgcggcagtcatcgtgtcaagccgtgtgtcaaaatcagcagaggcaagattaatggccttggcaagcgaaaccgctccagcagtatgttctgttccggcccgtatgcctttttgctgagagcctcccgttatgagcggaataaggcgtgttccctcttttacaataagtgcgcctgtcccctttaggccgtgaaatttatgccccgaaattgaacatagatcaatgccggccttttcaattgccaagggcactttatagatgccctgcacataatcgacgtggaacaaaatgttcgggtgcttcttcagcacttcccctgccgcttcaatcggctgcacggaaccgacttcattgttcacatgcatcatgctgacaagcacggtatcgggacggatggctgcttttagatcttcaatagaaacaaatccgtcttcattcacagaaagataagtgatatcaaacccgaacaactctttcagctgttctaacgattccgtaacagatggatgttcaatagaagtggcaatgatatgtttgcctgtttttatctttgacaaagccgctccttttaaagccgcattattggcttctgtggcgcctgacgtaaatacaatatcatatttttttaggcctaaggaccttttgatttgatttttggctgcttgaagcagctgttccgtttcggctccatatcggtgcaaagatgaaggattgccaaagtatcggctgcttgtctgttcatatacgttcaagacttcatcgtaaggcttcgtcgttgaactattatctaaatatatcatcttttttactcctttatgaaagcggtacaaggtatgatatttatgttaccataacaaaatttaatagaaaattacgaaaaactagtattgacttctaatttttttaccatataataagatttgttcgtttcgtcatattatctgacaattaattgacagaatattttaacataattattaggaggatttttttcatgaaacactcactgcctgtcaaagataccattattattggtttcatgctatttgcgttattctttggagcaggaaatatgatttatccgccggaacttggacaagcagccggacacaacgtctggaaggccatcggcggatttttactgacaggggtaggcctgccgcttctcggcattatcgccatcgcattaaccggtaaggacgctaaaggccttgctgacaaagcgcaccctgttttcggcacaatctttactgtcgtgctttatttatcaatcggaccattattcgccatcccgagaacaggaactgtttcatatgaaattggcgctgttccgtttttgactggcgtaccagaaagactttctttattaatatttacacttatctttttcggcgttacgtactatttagcgttaaacccatccaaggttgtcgatcgagtcggaaaaattctgactcccatcaaattcacgattattttaatcattgttctcaaagccatcttcacgccgatgggcggattgggcgccgtgacagaagcatataaaggaacaccggtttttaaaggatttttagaaggctataaaacaatggacgcacttgcttcaattgtatttggcgttgtcgttgtaaatgctgtaaaaagcaaaggcgttacacagtctaaagctcttgctgcagcctgcattaaagcaggtgtgattgccgctttaggcctgactttcatttatgtatcccttgcttatttaggtgcaacaagcacaaatgccatcggtcctgttggtgaaggagctaaaattttatctgcatcttcccattatttattcggttcattgggcaacatcgtactcggagcagcgattacagtcgcatgtttaacaacaagcatcggccttgtcacatcttgcggccaatatttttcaaaacttattccggcattatcatataaaattgtcgttacgattgtcacgttattcagcttgatcattgcgaattttggactcgcgcaaattatcgcgttttctgttcctattttatcagctatctatccgcttgccattgtcattatcgttctttccttcatcgataagatctttaaagaaagacgcgaagtgtacatcgcatgcttgatcggtacaggacttttcagtattttagacggtatcaaagcagccggtttctcacttggatctttagatgtgtttctaaatgcgaatcttcctctttacagcctcggcatcggctgggtgcttccaggaatcgtcggagcggttatcggctatgtgctgaccttattcatcggaccatccaaacagcttaatgaaataagttaatgtcacagaacgcctgcgttattgcgcaggcgttttgtaataagaaaaagagcctgctcattacactgcgggctctttttcatggtcgtgattatctaagcggatatgtcagctttgattttttcaactgcacctggcgcagccttttctacagcggtagctgcaatttcataagagtcgtcataatcaaaagcataaaaacgtctttccgcttctttcagctgttcagataaaatatgattctggcttctgaaccggtttccgaactgaatgattttttcaatgaggatgacctgctcgacaagttcctctgattcccggcttgccctgttgacgatatcttctgcttgtttcaaatgggctccggcttcttccatatttaatggaagttcgtttagttgattgaccgtttcttgaatatgatgatgcgcgttctccagcatctcttgaatatggctcggaatgcctggaatgttgctagtcttcagcagtcttgctgtctcagaaattgtttttttcaaattgctgagcgtctccctcgcctgaagctcttcttttctcagcgcttgcagattttcacgatactcgtcatgctcttttttcacttcttcaatttgcttctctattgaagcaacttcttccactaaaagtgagtaggcaacatgctctgcatcgagcttatctttaacggatgatagcagcttcccaatttcatcaaggcgcttttcaaaagcctgctgtttgccgagctcaccggctgtcagcctgtagctttccttcaccagctcagtttccgccttcgtatgctctttctcttctttaagcttgtcgtaagcaataatcaattcaggcattttgcttagtacggattgaccggcttcaacttcgccctccagctgctgataaacagattgaatattttcgtcaatgagctgcaggattgcggacgcttcatcaatatccagctcagtcatcaggacatgttccgctcgtttcagctggtttgacagattttctaattccttatcaagctggatatgctcaagcttgtaccctttttctttcatttcgccatagccatccttgagctttgcaatctgtccgggcaccgtctgtttacagtcagctaacagcttcggcacatcatctatgtatgactgaagccgttcaagattgcggtcctgctcaagcagtacttttcttgcagtaatatagtttccgccttctgtttcttcttcaaattgtttgatgccgctccaaatttcgtccagatccttttcaaggctgtcataaagctccccgtaaaggtggctgtaagccagcaggttttttcgagatttcgaatagcgctccctcacctgttcaatctcttcacggctcttttcctcacttgtgacaagatcgctgatttcccgaagaatcttttcaatgcttgattcagccgctgtcagcaggtcgtcgatatgaacgagcacttgattggcctttttaaaccggtatttgtctgcattttcctcggcatcataaaggagctcttcaactttcggcatgtgggctgtgacaatctcatcccattcttcacgccacttctcaaagaactcttctgtctgacccgtcatttttaaatgttttattttagacatttcttccacgatcgaccgatttagaatttcaatcttccacgattccagccggtcgatttcggcgtagacttttttcctgaaaaagtagcctgccgcaaacagcgcaagcagtacaattaataatccaatgacaaactccataatgagcccccttgctgtttaccttaatctgtcagggtgttttatttattcagaaagatttcaggatatgtattgagaaaaactgtcgttttcattgttattatgataccatgtaacaaacattttttgaccagaaatcaaaaactttttgtgcaaaatcggcaggatttgactattttttcatggggtgacatcaatgcaaaagcgagacggacatattcacacaccattttgccctcacggctccaatgacacactcagacaatatgcagaagaagccttaaaaaaagggttcgaatcgattacttttaccgaacacgccccattgccgccctcttttaccgatcccacgccgctgaaagacagcgcgatggcgcaagcttctttggaacgctatattcatgaaatttccggattaaaaaaagaatatcgcggacagcttagtatacggacagggcttgaagtcgattatatcgctgaatttgaagacgaaattacattattcctggacacatacgggccatatttagatgacagcatcttatccgttcattttttgcgcacagactcttcctatctatgccttgattatgacgagcataccttcaaagagctgatttcagcctgcggaagcattgaagcggtatatgaacaatattaccggagtatctattcttccattgtagcatctctcggcgtttataagccaaaaagagtcggtcacatcacactcgtccaaaaattcatcaagctgtttccatacagcatgtcagaacatattcgcggcctcgtttccctgtgcctgaatgccattgaagaaaacggaatggagctcgacttcaatacttccggcttaagaaaaacttacgctggcggtatttatatcgaggattggatgctgaatgaagcgaagcaaaagaagatcccgcttgtgtttgggtcagatgcccatcaagcgggagatgtcggatatgcgtatgaggcgtttttggaacggtgctagttggtgagcgccacgtctcctgtccggaagacgcttctgatccaaatcttgatttcttcaaaatacattttataaaaatacggctcgtgcggctgcatgtagagtacttctgaaatatattgaggctggagatagggcatcatcaagagagattttaattggagaataaaatgaggcagcggcagcgttaaatattcacgctgtttttctccttcctcaatgatcagctggaagatatacttttccttcattagatatgtcgacataatttccctgattaatgtggagtcaattgtgacttcccggtagacaaaacgagttaattgacgatgattatgctgataggataaaatatcgaaaaccaattgaagaagctgttcctgagtgctttgagaagagatattgcttgccgctgtttcaagcgttttgctgtagccctcgtaaaactctgaaactaagtgttccatcaagcctcctttgcctttaaaatagtaggagatgtgcgcaacatttacatcagctgactttgcgatttcacggacagacgtgccagaaaatcctttttggttaaaaagcatgacagcagattcaataattttgtctttggtgcttactttcatacggctcactccttcctcttgatactattcaagcagaaagccgctgttcctgtaagaacttatcgacaaatgccggcagaaaagccggaactttgttttatattatagaaaaagtgagggttttccatgttccatgtcgaaaaacaatctggagataaagaaaaaggctatcagcttctgctaaaacagctcgaagccatgaccgaagacgaaacagatcaaatagctaactatgcaaatgcctcagcactgctgtatcattcgctgcctgaagtcaactgggcgggtttctattttgccaaagaagaggatggacagcttttgttaggtccgttccaaggcctgccggcatgtgttcggattcctttcggcagaggggtttgcggcacagcgtacgcaaacggaaaagtggaacgtgttgaggatgtaaactcgtttccgggacatatcgcctgcgatgcagcgtctcaatcagaaattgtgcttccgattcgtgtagacggaaaaattgtcggcgtcttggacatcgacagcccagtgaaaaaccgtttcgacgaaattgatgaaaaatacttaactcaatttgccgaaacgctagaaaaagcgttagcgcagtaatataaaagcccaaaactgatatcgttttgggctttttttattttattgagtcatgaaccatcaagcggtttttcccgctccgtttcgcgctgtagagcgcttcatctgcctcatgcacaagctctttcagcgacttttttgtttctgtcgtccagcaggagataccgcaggaaatggttacctcgggtttcgtattttttctgaccgcgtaaaccagtcgctcggtaatccgtttccccactgcaaccggcacatttggcaaataaatcgccagctcctctcctccccagcgggcaccgacatcatgctttcggatgttgcttttaatcactgaagcgacttgaattaaaatctcgtccccagtctgatggccgtacgtatcatttacatttttaaaattatcaatatcaacaagaataaaaacacccttttgatggattttcatgctgtattgaattttttcatctaaatacgctcgtgaatacagttcagtcagctgatctgttttcacgagatgctcaaggcggtcgcgaagcattgaattggttacagccagtgtcgcgtgatgaatcagcgcctgaaacagcttgtacatttcaaatgtaaaagcgtacagctcctgtttcaataaaaccgcaaagcctaaaagccggtcgttttgaatcatcggagcagccatcagcgagccgtaccccgccttcccaaaaacagactggccattcccgatgaaaacccctttttcaccttcatacagcttttctttcagctcattataaaaatctgacggcttcgcttctttaaaaaatgctgtgctgcctgggagcaatgttaggttttcaaaatggtctatatgaaaaaatcccacttcttctgcctgaaacgattctgccattctcacagccagatcattcattgtatcagtcaatgtcagccgctgattcaggcgtcgtgatgtttcattaatcaattccaaatttgcgatgcttgctttggattgttcgtagagctgggcattttcaaacgcttttcccgcggcgtttgctaacagcgacatttcatcaaggcaggcatcagtaagaaagctgtcacccgttccttcagccttcaacaccccgtatgtgccctgctgtcctttgatcggaatataggcgacagattcatttttccgcaaaatgtctccggacaaatacactttgagcgcaaaggaatcggatttttccccttccatatatagctcttttgcaggaatccctaaacattggtcttgatcgtgcgatataaataaagaaaactcaaaaagagaaaatgtgcttgtcaagctttctaaaagctgcttcagcacatctgtctgatcaagcagtgaatggaacagctctgtcattttgtatatctttttttggtagatcgttttgttatagagtctttcctgtttcatcgactggtttaaaaatgaagcaaccacgtccggaagcccttcaggaatctcttcatcctgcctgcatgcaagatggaaacgcctgccggagccgtcctcaatcagataacatgaagcgtttatttttgaagcggaaaaacgcgcttcaccatctgccagttttgtcacaaagtctgatggtgacggtgtaagcgaaacacacagggttgaaaaataggtttgaatagccgaagtcagccatatgaaagagtcggtgaatgtgactttttcagatttggttaataaaaaatcgagcatatgataatgaaaggcggataattgatctttagtttgttctaccatgtttttatcacctaaaagtttaccactaatttttgtttattatatcataaacggtaaagcaataatggaggaatggttgacttcaaaacaaataaattatataatgacctttgtgtgaaatattgcagcctttttgttcagcttctatgttttcattttgttccttatcaataaggtgtatcgtgtaactctctgctgctggagcgaggatacatgaaaacaaaatgtgcatggtcgaatagagcagacggtttttattttccacaaaaataaaaccaaaggaggagtcacattatggctcgctatacaggtccatcttggaaactgtcccgccgtctaggaatctctcttagcggtacaggaaaagaattagaaaaacgcccttacgctccaggtccacacggcccaggacaacgtaaaaaattatcagaatacggtttgcaattgcaagaaaagcaaaagcttcgtcacatgtacggtgtaaacgaacgtcaattccgcactttgtttgacaaagctggcaaactagctggtaaacacggtgaaaacttcatgattcttttagattctcgtcttgataacgttgtgtacaagctaggtttagcacgtactcgccgtcaagctcgccaattggttaaccacggtcacattcttgtagacggaagccgcgttgacatcccgtcttacctagtgaaacctggtcaaacaatcggtgttcgcgaaaaatcaagaaacctttctatcatcaaagaatctgttgaagtgaacaacttcgttcctgaataccttactttcgacgctgaaaagcttgaaggtactttcactcgtcttcctgagcgttctgaacttgctccggaaattaacgaagcgcttatcgttgagttctactctcgttaatcgttttaaaaacccctgccgctatgcggtcggggtttttttatcgtctgtttcgtcattcgcctcttgctggccaacactttcttgcgcctgctgctcccaatgatcccgctgcagccgttcttttgcaatcgtacacatgagattcacgctttagcgctcctttcatttaaaaggtggtgattggtcgtgtttgccctatctaatatactcttttcctttcattcctatgcggtaaacaaaaagatcctttgccttcagtggcaaaggatctttttcttatttatacgtcacaaggaagtattttttcttcccgcggcgcagaacagtaaattgatcttcgatgcggtcttcacctgatagggtataatttatttccgtctggcgttcaccgttaatgtaaacagctccgttttgaatgtcttcacgcgcttggcgtttagaaggagataatttagattgcaccaacacatctacaagtgaaagctcttgggtgctgtcaacttccatagaaggaacatctttaaagcctacttttacgtcttgagcagaaagctctttaatattgccgctgaacagcgcttgggagatgttgatggcttgctctagcgcctcgcgtccgtgaacaagtgatgtcacttcttccgccaggcgtttttgcgcttcacgtttttctggcgccgtttctgttttttcagcgtatgcttcaatttcctcttttgaaaggaacgtaaagtatttcaagtatttgacaacgtcacggtcgtctgtgttgatccagaattgatagaattcatatggcgatgttttttctttatcaagccagatcgcgccgccttccgtttttccgaacttcgtgccgtctgcttttgtgacaagcggaatcgttaggccgaacgcttttgctccttcttcttctgattttctgatcagttcaagacccgctgtgatattgccccactgatcgcttccgccgatttgcagtttacagtttttgtctctgtaaagatttaagaaatcataagattgaagaatcatgtagctaaattccgtgtacgagatgccggattcaattcttgagctgaccgtatcttttgccagcatgtaattgatgccgaaatttttaccaacgtcacgaaggaaatcgatcacattcattttgccgatccagtcaaagttgttcgcgatgacagctgggttttctgctgcttcaaaatctagaaatctggacagctggtttttgattttttgggaccattcggatacgatgtcagcagtgtttaatgtacgctctgctttttttccgcttggatcaccgatgaggcccgtcgcgccgcccacaagcgcaatcggatgatgccctgcaagctgaaaacggcgaagtgttaaaataggcagcaggtgtccgatatgcaagctgtctgctgtagggtcaaagcctgagtacaagcggattttttcttcattcagctgtttatttaacccttcttcatctgtcatttgctgaatcaatccgcggaaggataagtcttcaagtaagttagtcataagataaagctcctttttgattaaaataaaaaacgccccttcgtttacacgaagggacgattgattatcgcggtaccaccctactaataagagaatgcaaacattcgtcttatcactttgcctgataacggatcaggtccgttctttcactactgaaagcctggccggctttgtttgcaaaagcggttcatgagtgtattcgatatatccgtctgtgctgattttcaccggccatcagctctctggaacgtaaggatattctacttgtctcaatctttaccttttcatatgaagctatatcatttttaacataaataaaatcctgtgtcaacgccgccttttaatcctccattgttgacagatctccagccggcagattaagctcccatgccttcagcacgcgcctcatgatctttccgcttcgggttttcggaagcttatctttaaattcgatctcacgcggagccgcatgggctgcaagaccctgctttacaaataggcggatctcttctttcagtttatcagacggctcaaatccttccctgagtgcaataaaggctttaatgatttctccacgcaccgggtcaggctttccgattacgcctgcttctgcaatagccggatgttcgacaagcttgctttccacttcaaatgggccgacgcgctcaccggaggtcatgatgacgtcatcaactctgccttggaaccaaaagtatccctcttcatccatgtaagcagaatccccagacacataccagccgcccggcatgaaatacgattcatacttttcagggttattccaaatggtatgcatcatggaaggccagccctttttgatggcgagattgcccattcggtacggcggaagctcgttgccttgattgtcaacgatcgctgcctccactcctggaatcggcttacccattgaacccggtttaatatccatgcaaggatagttgcagataagctgactgcccgtttctgtcatccaccatgtatcatgaattcgtttgttaaaaactttatgtccccatctgatgacttccggatttagcggctcaccgacactgagcacatgccggagtgaagttagatcatatttcgcagccatttcatctcccgctcccatcagcatccgaaaagctgtcggcgcgctgtaccagacattgacgccaagctgttcaatcgtaccataccagctttccgggctgaaacgtccaccgacgatgacatttgtcgctccgttcagccacggtgcaaaaatgccgtataccgtacctgtcacccagcctggatcagccgtgcaccaataaatgtcttcttcctttaaatcaaggacccactttcctgtttgatattgctgaatcatcgcttcatggatatgcagcacgccctttggcgtaccagtggaacctgatgtatagtgaagcagaaagccgtcttttttatccatccattcgatatccagtcttgtgctttcctgtttcgctgcttcatcataattgatgatattcgtgccgctctcagcctctcccccgactacgaagacatgctgcaagtgaggcagtttgtctaccggtattctctccagcagctcaggtgttgtgacaacaacctttgcctcactgttttcaagccgatctttcaccgctccctccataaatgcttcgaacagcggcccggcgatggcgccaattttgattgcgccaagcataataaaataaagctcgggtgatctcggcataaaaataaaaacgcggtcccctttttccacatttccataccgtctcagcacattcccggctctgtttgattcttccttcatttctttaaatgtgtatttttcatcccgttttgcgtctttataataaagcgctactttgttttttcgaaacgattcggcatggcggtcaatcgcttcatacgccgcattcagtttccctgtctcatgccaagagaaatgtttctctgcctcggcccaatcaaaatgccggtacgtttcttcatagttttttaagttatgatccccctctattgctggtaacgctttcaaattcatgcccaaacatccccctttgctgaagttgtcacaattattatagtatatattcatattcttctcaatttttaaaatataaaccaggttgaaaacgctttataatttggtattcttaaagaaggcatgtatttttgataagaattgatgggacggtgaattagtggaacatcataaaacataccattcagcaaacatcaaaacagcaaccggctctttactgatagaagggcctgtctctccagaggatttggcaggttatgagtttcataaagatttaaccgcatttcgcccgcctcgcgagcagcatgaagcgctagtcgacattgcaggccttcccgaagggcgcattattattgccagagacggccgaaccattgtcggctatgtcacgtatttatatcctgacccgctcgaaagatggtctgaaggaaatatggaggatttgattgagctcggagccatcgaagtagcgccggactatcggggatgcgctgtcggaaagacgctcctgaccgtcagcatgatggatgaacaaatggaaaactacattgtgatgacgacagaatattactggcattgggatttaaaagggatgaaaaaagatgtgtgggaatacagaaagatcatggaaaagatgatgaatgcaggcggattggtctggtttgcaacggatgagccggagatcagctcccaccctgcaaactgtctgatggcccgcattggaaaaaacgtcagccaagaatcaattgagcaatttgacaggctccgtttttatcatcgttatatgtattaactgacactgacaaaggggaaaaaataatgattgttgagcaaatcatgaaaagagatgtcattacattaacgaagacagatacgcttgaaacagccatatgcaaactgaaggaattccatatcagacatctgcctgttgtagatgaagaacgacacgtgatcggcatgattacagacagagacatgaaacaggccagcccgagtatttttgaagaaaacaaacgaagcctatttctcacacgaagcgtagattcaattatgaaaaaggatgttgtctgcgcccacccgttagattttgtcgaagaaatatcagccgtgttctacgagcatggcatcggctgccttccagtggtgcaccatcaaaaattaataggcattttaacaaaaaccgatttgctgcggacgtttgtcaaattgacaggcgctgaccagccgggatcgcaaattgagataaaagtaaacgacatcaccaaaagcctcgctgagatcagcagtctttgccaagaccttcaagtgaaaatattaagcgtgcttgtttatccgcatgacgatcccggtgtaaaagtgcttgtcttccgtgtaaaaacgatgaatccgctgccgtttttgcaggcattacaaagaaatggacaccacgtcgtatggccgtcagagcaaagggatctgctatgagagacagtgtatttatctattctccatcctaccaaacctatatgtttcatcaggagcatccctttaatcagcagcgggttctgttaacatatgatttgcttaagacgatcaatgcctttgatgatggagacattgtcacccccagactcgcttcagaagaggagctttcccttgtccacacggacgattacattcaggccgtaaagcttgcgggcgccggaaagcttcccgctgaagaaggagaaagctacgggctcggcactgaagacacacccgtctttgccggcatgcacgaagcggcatcactcttggtcggcggcactttaacggccgcagactgggtcatgtcaggacaagccctgcatgcggcaaaccttggcggagggcttcatcacggctttcgcgggagagcatcaggattctgcatatacaacgacagcgctgtggctattcaatatatccagaaaaaatatagcgccagagtgctttatattgatacggacgcccaccacggggacggtgtgcaatttacattttacgataatcctgacgtatgcacgctgtccattcatgaaacaggaaggtatttattccctggaaccggccagatccaagaaaaaggcagcggaaaaggatatggctattcctttaatattccgattgacgcttttacagaggatgattcttttcttgaggcttaccggacagcagcttcagaagtcgccgcgtatttcgagcccgatgtcattatcagccaaaacggcgccgatgcccattactacgacccgctgacgcatttatcagcaacaatcaatatatacgaagaaatcccccgtcttgcacacactttggctcatcaatattgcggagggaaatggattgcagtcggaggcggcggatatgatatttggcgtgtcgttccccgcgcctgggccagaatatggcttgaaatgaagggaattgacccgggatacgagataccgccggaatggattgctaaatggcaaaaacaatgccccgtggcccttccgtcgagctggagcgatccggctgatttatatcctccgattccccgcaagcctgaaatcacagaaaaaaatgcccaaactgtcagcaaagcattatatgcgatacgctctgaacagcaaagaacaaagtaaaaaacgacctttacgaagaggtcgtttttgattttttgatcactatttccacacgccgattttccttcatgtgttcatttgtcttgttatccttcaccggctttgtatccgcataaccgacagcaataaagcgcttggagggaagcttctcttttgacgtgaagtattgaatcactccacttgcccgtgctgctgatagctcccaattcgacgggtatcggtatgtcgaaatgtttcggctgtctgtatgcccctccacctgaatgtcatttggaatggtttgaagaagaacggcaatttggtgaagaagtgtttcggcatttttcagcacctttgcctcacctgtatcaaacagcacagcctcctgaagaacgagcacgacaccgcgttcatcccgtttggctgtcatttgggccttcaaatgattgtcttttatatatgtatttactttcttgagaagctgatcctgctgatcctcttgcttcttcgtatcagatggggatgtattctttttttctatggatgtttggtccggctgaagcccgttgccttccttctggatcgagtccactgcagctttgaatttttgcagatcgatttgggacatcgaaaagagtaaaataaagaacacaaggatcaaggtgatcagatctgtaaaggttaccatccagctggatgaagattgactgttttttccgcttccattccttctgtcaaaacgttctcttctaagcttcatgtacagatcccttttttgtttttacttgttttggctgcttcttccattcttcccgtgagctgaaaacgaccagctggctttcaaggttgcgcgggttttttccggattgaacaccgataatcccttccaccattacctgcttgatgaaaatttcactttctgttttctcttcaagcttagccgcgatcgggttgaagaccatatttgccagtaatgaaccatataaagtcgtcagaagcgcaatggccatgtttggtccgagcatatgcgggtcgtttaagtttttgagcatcagcacaagcccgacgagtgttccgatcattccccatgccggagcgaattctcccgctttttcaaaaactcgccgcccttttcggtgccgttcctccattgctgcgatttctgaatccatgacgagccgaatcgtttcttcatcccagccgtcaatcgctaaaagcagcccttttttcaagaatggatctttgatttcccgagcctgatcatccaatgataaaagcccgtgttttcgcgcgtgatcggaaagggaaacaaaggttttcacaagatctttcacattgtcttcctggcggatgaatgcctgctttaacacagagggcgcttttttcagctctcttggcggaaaactgataaaaacagcggcgcaaagtccccctgttacgatgaagaaagaggtcagatcaagaaaagagcggaaaccgcttactcccgatcctgaaataatcccgataacaataataatcgttcctaacacaaatccaacaggtgtaagataatcaaaacgtttcatcatttctccccatgaaaaaagcaagaattcaccataaaggtgaagcttgctctttgtttttcttatgacttggttgactttctaagctctatacggtgcggcagttcgacgatatgctcttcaaccggctctttattcatgagcttcgtcagcagtctcatcgcaacggcgccgatatcatatgtcggctgaacaactgttgaaagctgaggacgaaccatgaggcttaatcttgtattatcaaaaccgataatgtcgagatcctccggaatggataagccctgatcctgagcggcatggataatgccgagtgccatttcatcagttgcagaaagaatggctgtcggttttttatccaggctcatcagatgctgcagtgcttcgagtccggaatcatatgtgtaatccccttcagctacaaattgttcattaaacggaaggttcgcttcttcaagcgcacgtttgtagccttggagttttttcgaacggttgatcggttctgccattggtccggaaacgaacgcgatgtctgtatgtcctttatcaaccaaaagcttcacggcatcataaatcgcctgttcgtaatcgatagcgactgacggtgtttcctcctgctcttctacagaagcggcaagtacaatcggcactggagaacgcttaaattccgccacatgctcgtccgtaatgtttccgcccataaacacgatgccgtccacttgtttgccgagcattgtgtttaacaagtgcagctctttctccatgttttggtcagagttgctcaaaataatattgtatttatacattgtcgcgatatcttcaattccgcgcgcaagctctgaatagaaaatgcttgagatatcgggaatgatgacacctacagttgttgtttttttacttgccagtcctcttgccaccgcgtttggacggtaaccgagacgttcaatggcttccaagacttttttcctcgttgtcggttttacattcgggttgccgttcacgacacgggaaacggttgccatgcttacattagcttctctcgctacatcgtagatcgtaatattgctcatcctaaaaccactccttttactggatacacttatccttatctatagcataaacactttatgtagagaaatgtcataatgtccgaatttatgtcgtttatgatttgtaagcgtaagtcagtagtgtacattatttttcattattcatcaaatttaattacttctcatgaaattatacacgtttttatagatgatgaaaacgtatacttggtttttataactaaataaacgagaaagcataaaaaaaggccgcaggcgcggccttttggattgttcaattaagcgttgactttcaccattggcttcagttcattcagccatttttcgaattcaggaatcgccatttgctgagcagagtcagaaagtgcgactgacggatcagggtgaacctcagccattacgccatctgcaccaatcgctaaagcggctttagctgtcggaagcaagaggtcacggcggcctgttgaatgcgtaacatcaacaaagactggcaaatgcgtttcttgtttcaaaatcggcacagctgaaatatccagcgtgtttctcgttgctgtttcatatgttctgattccgcgctcacaaaggataatttggtcattcccttgtgacatgatgtattcagcagcattgatgaattcagagatcgttgcagcaagaccgcgcttcagaagcactggctttttcacggcgccggccgctttcagcaattcgaagttctgcatgttgcgcgctccgatttgaatgacatcaatgtagtccagcgcttcttcgatatgagccggagttacgatttcactgataaccgccagatcaaattcatccgctacacgttttaaaatttgaaggccttcaacaccaagcccttggaaatcgtatgggctcgtacgaggcttaaaggctccaccgcgcaaaattttaatcccttgttttttcgcagctgcagcgacttcagctacctgctcatagctctctactgcacatgggccgacaatgaatctttgctggccgtctccgattttttcgcctttgatatcaacaattgtatcttcaggttttttcttgcgggagacaagcagcgctttgctgtgatcttcttcctgaagctctaaaccggctttgaatatctctttaaaaatgtgctggatggttgaattttcgaacggcccgtcattgttttcaatgatattgtttaacattgtgcgttctctgacagggtcaaatcggttgacgccctgtgcttccttcgctttaccgatctcttttacaacatttccgcgttcgttgattagttttaaaatttgtaggtttaattcgtctgctttctgccttaaaagctctaactctgtgttgctcatttttttcatcctttccctgcacattcattttttattttgtagttatcatgcatcttactataagtaattccaaatggaaatactgaaatacaaaaaattttataaaaactctactttattacccaaacgcttttaagtgataaagtaatctatgaagctatcctacatgatgtgagggcaatgttcaagggttttttacaaaaaaaagcgccagatgatatctggacgcttttttctatgacaaatgctgctcaatagcggcttctgtaatttgtgaatgtgaggtatgccatttcacttcaccgttctggatgatgaatacctgagggctttcatgcttgaccccatatgtttctgcaatgaaattggacagcggccgggcttcttgtacttgaagatagtaagccggcacatcctcatgctgatttgcaaaggcatcaaactcatgaaatgctgcctggctgatcgggcatgtggtgctgtgtttaaagaagacgaaaacgccttcctgttctgcaatccgtttaaattcttcctcagattgaataagctgtttagccatgactcaagctcttccttccctgctcagcgattcaactgctcagcctgtttttgtgcatctttcagttcgtcttttacatcttctttcgtctggaggacttgatcttttgtttcatcagccgcctgcatcgcttcttccctcatatcctgcattgcagtcgatgaatccgttttgtcagatttggaacggtctctcaaatcctttaccttgttcatgatctgtccagactgatcggctacaagctgtgtgatgttggaagttttgtcttttgcgatgctgacatattgcgtgcctttttccttcgcatctgccgtcattttatcagttttgtcccgtaaggcaacagcctggctgccgagatcgtcgcgaagttctttgcctgatttaggtgctagaaaaagagctgtagtggcaccgatgattcccccgattaaagttccgattaaaaaatctttactattaattccatctttgctcatcattattcctcctcttagtatttttttctcttacagggctgattttttcttttgcttccatttctcccaaatttccattgctgcttgactccaagtgacaacttgattgatcttatcttgattttctctaactgatgccgatacagaccctgccgcttgtttcatggatgtattgaactgctgtacagaagctcccactccttgaacagcatgaacgaccgtgttcagcttttctgatttttcctgaatatcttcagccaggcggttggtcttatgtaaaagctcggctgtttcagttgtgatgcccttcatttgtccctccagcccttcaagagtggatgcgacgttttttagtgtcagctgcaatgacttcagtgttttagacaagtagatcactaatacgagaaatgcaactgcgatgagtgcaacgctcaaataaagaataataatcatctcaaacctccttgctgcaggatatactgctgtttacccgttttcttcaatcataaacatgtgtactgggctgtatacatactattctccgttatgtaagaaaatcctttaataagcttttccatcagataaataaaaagcagtgagatcactgctttttattatgccatgacgttttcgtaggctctcatatatttttggatatctcctgctcccatgaagatgagaacggctttatcatgagcttttaaaacagatgtgtcatcttcttcaatcagcttggcattatgaatttttccctggagatcgccgatcgtcagctttccggcattctcacgggctgagccgaaaatatcgcataaatacacacagtcggcgccgctcaggctttctgcaaattcgtcaaggaactgctgcgtccgtgtaaatgtatgaggctggaataccgcgacaatttcccgatcaggatacttctgtcttgccgcctcgattgtcacttttatttctgtcggatgatgggcatagtcatcaatcagcacttgatccccaagctgcttctcattgaatctgcgtttgacgcccccaaaggatttgagagcatgcttaatgatgctggaatcaatttcttcataatggcataacgcaatgaccgccaatgagtttaatacattgtggtggccgtacgcaggaatataaaacgtatcatagaacgtattgcggacaaagacatcaaaagttgtcccttccgtgctttttacgatgtttctcgcttgaaaatcattttcttcccccgtgccataatacacaaccgggacgttcgcatggattttcggcagatgctcgtcgtctccgcaggcaataatgcctttgttgacttgaagagccatctcttggaaagcgtcaaatacatcgtcaatgcttgagaagtaatcagggtgatcaaaatcaatattcgtcataatcgcgtaatctggctgatagcttaagaaatggcggcggtattcgcacgcttcaaacacaaagtattcgctgttttcatttccctggcctgttccgtctccgattaagaaagacgtcggttttgcgttttggatcacgtgagccagcagacccgtagtcgacgttttgccgtgtgcgcccgtaacggcaacactcgtgaattttttcatgtagtcgcctaaaaacttatgataacgtatcaccggaattccctcagacatcgctttttctatttcaggatgcgtgtctgggaatgcgtttccggcgatgactgtcatgccgggtttaatattctccgcgctaaaaggaagaaccgtaatatttcttttttcaagcgctgtttgcgtaaaaataaatttttcgatatccgatccttggacagtatatccattatcatgaagtatttgggcaagcggactcataccggtcccttttattccaacaaaatgataaacagtcataattgtacctccaacaaacgtctatctgttccccagtatatgacgctcatttcaatttgcgaccgcggcggctgaaaagcctcccttagcggcgtattttatatgttttgttatgtttagtatcaggttatttctttccgattaaacccagatatcaagatttgtctatgcacagctgctgtaaagcggcatagctgttaaatgctctaaacactatcataccatgtttggtgtgaaaatgaacccatattattcgtttattaaatcacttgctgtgatcagcacctcccgaggcttgcttccttttgcctcagagatcatgccttccgcttccatcatgtcgatcagccttgccgcacgattgtaaccgattctgaatcttctttgcaggcttgaagtgctcgcactgttttgctctacaacaaactcacacgcttcgtaaaacagttcgtcctcttctttcagggcagatccttgtcttacgagctcttcttgttcaaataaataggtcggcggcatttggcttctgacgtgggaaacgacgcggtcgatttcccggtctgacacaaagttaccttgcagacgaaccggttttcccgatccgttttccaaaaagagcatatccccttttccgagaagcttttctgcaccggctatgtcgataattgttcgggaatcaacctggcttgaaacagaaaaggcgattctcgttgggatattcgccttaatcagacctgtaatgacatcgactgacggacgctgagttgcgacgagaagatggataccgcacgctctggctttttgggcgatccgcgcaatgctttcttccacatcgtttggagccaccatcatcaaatctgcaagctcatcaataatgacaactaaatatggcagcttttcacccatttggtgttcagcggttaattgattaaagcggtcaatatcgcggacacctgaatgggcaaaaagctcatagcggcgctccatttcctcaacgacccatttcaaagcagctgtagccgctttggcgtcagtaatgaccgggctgacgaggtgaggaattttattgtaaggggccagctctaccattttcggatcaatcagcagcacctttacctcactcgggtcagctttataaagcaggctgactaatattgtattgatgcatacgctttttccggagcctgtagcaccggcaatcaagccatgcggcattttcttcaagtcgataacaacaggatttcctgaaatatctaatcccagcgcagctgtgagcggtgacttgcttgtcctgaaagctgagctgcgaatcatttggcgcaaatcaaccaccttgctcgtgcggttcggcacttcaattccgatcgtgtttttccccggaatcggcgcttcaatccgaatatctctcgctgagagactgagtttaatatcatcggacaagttggtgattttattcacctttacacctggttcaggatgcacttcaaatctcgtgacagacggaccctgggttacatggaccacattggcgcggacattgaagtttttcaaggttaaatcaagaagctgacgctgttcttcgatccacgcagtatcatcttgaacctgcgctggcgggacatcaagcagtgcaacattcggaaatacatagctgccgcggcgctcctctgctttttgctgtttatgcgtatctcttttcagcatcatcacattaaaaggaacggatggccctttttgagaagatgcgctttgttcagtccttttctcctgtacaccaggcctttttttcggctcttctgaagcttcgcgaggtttgtctgcgcgaattccctgccggttttcaagagttgcagtaaacgatttggaaccctgctccatgtgttcagttttctcaagctctgtatggctgtctggctgaacatctatcttcgtttcctgagcctctcccaggatgtcataatgattatttattatgctgtctgatggctcttctgattcttttgccacagtttctgcttgagccagagcctctgatgaatactcatgatcagtaaataaaggctcttcctgacgaatgtccatttgttcttcttgaacgaacggggactcagcaccttcttccgcgttttcatgatgattgtatactgggctgtctgacggctcttttgctttttcatcctcagatattgcctctgtctgagattcaggagctgtttgctcttcatcaagttcagcggagaaaacaggctcttcaaatttctctggctgctgctccctttgttcttcctcagccgttgcaggctcttcgcggcctacttcactgtctgaaagcccttcagccgccgtatctgtgagcatctcaggcggtgtttgctcttcggcatgttcagctgggaaggaaggctcctcttcttccggctgttgaacgcctgactcaaatggcactttgttacctgacggctcggctggccttttcgccagcgcctcatcattctccgtatcctttctgtttaaaacgccagaaggctgtttttcaaattgggtatccgggaagaaaggactttcttttttggaatgcgcctgtgtgtctgaagcaggatagccgcgttcacgttcgatctcttctgacagcagtgttaccttctcttttaccgatttatccggttcgttcaatgtttcagaaggctttttcggcacatcctttttaacagatggtttttgattgaatccatagacaggcgaagggatatttgtcggtttaaacggtttcttcgccggctctgctgcttgatatgtatgctgctcttcttcatttctgggacgctctctgtaaggtgcagcacttggacgaggcgcggatttcggttcgtccgatggtgtgcggcgccttctcaggtcatgatttttgtatccgtcaggcacgactggaaaacggaatttgccttttggatattcataatatattttaggatcttccaatctttttaattgtccttcaggatgatgtacttcttgttgctgcggaatttgagcgggttttgtctcccgttcagcatcctcttcgctttcgcctaaaaacaaatcaaaaaatttatgaagccaactcataatttatctctaactcccttatagttttctgggacggtttttagtataccactgctggtcggcccagaaaagattaagctatcagcagaaacaaagccgctaaacaagggcttagcggcttttcacatgattcgttttttttggcggatttatgggagtctaaaaccgaaatgcgtctcctgcctcatagtctccttctaacacaaggattcctttttcagcaggggcatccggcaaatcaagctctttcgctgagcagatcatcccgcttgacggaacgccgcgaagctctgcatccttaatgacaagtccgctaggcatcacagcaccgactttggcaacgacaactttttggccttggtcaacgttaggcgcgccgcagacgatctgaagcgtttcttctcctacgttgactttacatacgcttaatttatccgcattcggatgtttttcttttgattctacataccccacaacaaacttcggagataaatcaacgactaatgtttcttcaacgccgtttctgtttaaaatctcattcacatcttgcacgaatgtttctgagagcgcaacagggccgttttcatcaatagtcaagtaagaagacgcgttgaaaatgttgaagcccgttgtttcttttgtttcgttattgaaaattttgacgacgtcgccgtgtttttcatagcctaattgttcgcgtgtcacatcttgaagagagatcaggagcgtgtctcccacaccttctttattataaaaagcgttcataagtaaaaatcctttctaatcctttttcggacggcttttcgccaggataaacaccggttccagctttccttcattgtacaaaaatgaaagggcggtaatcgggacggtgccgcctgcaaagaagctcatcgacatttgtcctagaatatcataccccgattcattccggatgtcagcaagaatcaaaacgtcctgatgaggaacagagatcgccagctccccttctgcatgctgcttatactcatttaagatcgcttcgttcaaaatccggcttgcgtcgtatccgtcgtttgccctgaagaaataaaagtaattgccggcaaccgtatcttctttgacaaccgtcggcagggaacggagattaaatgcggccgtctctctgatccgctcttttgtccagttttctttctcaagcatgcgctggtcaattaaacggtaggttttcccgagatcaagcgcgtaataaattcttgtctctgcggtatgatcgtcataaatgagcgggatatcttcactggacttgtccgggaaggaagtcgagcggatgaccggataaatgcgagtttctttcccggtcatttcctgagccttcccttccattgccgtcatcgcttcagagacatagtacacgatctcatcaatggcttcgtcttttttcagttcccattttgcaataatcggcggcaaatcgagtgtaatcccttttttagtcgtttgatcctcaacacggagggtgtctttttctctgtcaaacagaaaggagcgattctcgtgctgaaggcgctgtttcagtatatctgacagcttccttgaggtcattttcaaaccgatgtcctcctttacgctttagcgagagagtctgttaaaaactgttcaatttcttcttttgttttgcggtctttgctcacaaaacgatttacttcttttccttcattaaacaccacaaagcttgggattccgtaaatttcccactctgcacatgtatcaatgaatttgtcacggtctacgtagtagtaggtgaattcagggaaattcgcttccaattcaggcaggaaaggctctacaaaacggcaatccgggcaccaatcggctgaaaacataaatacagaccaatcatcctttaccgctttttccagctcttgagttgattcaatttttttcatttcatatccctccagttgtttatgttcttacatgttttttatcgatactcgtccatttggatcataccaaactgcttgaggcaaaaccacttatatgcaacgaatgaatatgtaagattggctttcccattatcattatcatattttatttgcattatcaagctcgtttcgtttaacatcgtgtacatgagggtaaaatttacagatggacatacataaggagggatttttatatggagtttatcgtctatttagcaggagaaatccacagcaattggcgcgaggaaattaaagaaaaaacaaaatcactgaagctccctattacgtttgttggcccgatggagaatcatgaccgctcagacaatattggtgaagaaattatgggcgtacagccaaatgccgttttaaaggatgacaaagcctctgacatcaacaacttcagaaccgccgtcctgatgaataaagcagactttgtgatcgccctgtttggcgaaaagtacaaacagtggaacacggcaatggatgcatcatatgcgatcgcaaaaggaaaacccctgattatcatccggccagaatcgctccaccatcctttaaaagagctttccaataaagcgaatattacggttgaaaccgttaaccaagctattaaggccctttcctatctatttgaaacagaataagaaaaaagcttgtcgatccgggcttactgctcgttcaacaagcttttatgaaacctacatattttctttaatcgcatccaccgtctgcttatcgcaggctgttacaagtttgatgagcatttctttagcagcagcataatcatcaatatgaatgatagaagcgtttgtatgaatatagcgggaacatattccgataaccgctgacggcacaccgctgttcgaaatatgaaccttgcctgcgtctgttcccccgccggatacaaaatattgatatggaatatcatgcgtttcagccatatcaagaacgaattccctcattccgcgatgcatgactgtcgttctgtcaagaatgcgcagcaaaaagccttttccaagctggccgaattcatttttgtctccgctcatatcgtttgccgggctggcgtcaagggcgaaaaacaagtccggtttaatcatatgagaagccgtctgcgcgccccttagccctacttcttcctgaaccgttgcacccgcatagagtgtattcggaagctctttaccgtgtaattccttcagaagttcaatgcttaagccgcatccatatctgttatcccatgcttttgataaaattttcttttcattcgccatcgtcgtaaacggacaaacaggcacgatctgctgtcccggtttaatgccgattttgatggcgtcttccttatcatccgctccaatgtcgatcatcatgttcttgatatccatcggacggtttcgctgcgcatctgtcaataaatgcggcggtatgcttgaaatcacacccggaaccggcccgttatctgtttgaatttcaacccgctgcgcaagcaaaacctggctccaccagcctccgagcgtctggaatctgagcagcccgttgtctgtaatggatgtcaccatgaagccgacttcgtccatgtgcccggctaccataattctcggtgcgtcctctgcgcctcgtctgactccgaaaacacttcccagtctgtcctgaacgatgtcatcggcatatttggctagctcctgcttcataaaagcacgaacctgatgctcattgcccggcgcgccgggaagctgcgtcagtgtttggaaaagcgctttcgtttcttgattcatgttttcccctcatttctatgtagtccttttattttattagaaacaatgaagttttccaagcaccctgacccaatctgctcgatcagccgcgtattgcttaacaggatttggctgtttctgtataatgaaaagtacgatcaaccaggaggtgctttattttgaaattgcgtcatcttcttttaggagcaggacttggaatttgtacggctgtcgttgtgaaacaatatgtgatgaagccttatatttcttcagaaaaagcgcttcgaattgtaaagtctgcttttaagcagcggggcccgattgacggatcatggatttacacccagccggagccttacaatattaacggagaaacggtacaggtatacaaaaccggcattacacgatcagctttcggagaattagaacagtatgaagtcatggtggatgcgaaaacgggagaaattgttgatgtcattgatacaatcgcctcttaacaccggacaagcaaaaaatagaagccgctgcctacgcagcggctcttttttattatatcgcgcgaatcggtttgtataccggataccacatcgcatcctgcactgcctgtataatgtcttcaggctcttccgtagcgacgccttccttcattgcggtttttgcaacttcaacagcaacggttgccgaaacagtgcgcaaatcttcaacttttggaagcatcggcgcgccaggcaccccgacattgaccatacctgcgattgcccgggcacatgcttcaaacatgccgtcggtaattaattttgatttggtaacaatcgttccaagaccgagaccagggaagacaagcgcgttgtttgcctgcccgatatgatacgtaactccgttatattcaactggcgggaacgggcttcctgtcgtgatcagcgcacggccttctgtccattcgattaaatcctccggttttgcttcagaaagagttgtcggatttgacattggcaaaatcgccggccgtttcacatgtgacgccatttcttttacaatttcttcagtgaaagcgccggaaaccgtagatgtgccgatcaggatcgtgggtttcgcctgccggaccacttcaagaagatcaatgcctccgccgtctccgttccgctgataatccttcacttcttcagccgaacgagcatacggcttttggaaatcaagaagctgatccatatcatctgttaacagcccgtttctgtctatgcaccagaagcgcttgtatgattcttcttcactcagtccctcgcgcaccaatgcttcccgcagctgttcggcaattccgattcctgccgttcccgctccgaatataacaactctgtgatccctcagcggaactttagacgcttttgcacaggataagactgcggccaaagaaacagcgccagttccttggatatcatcattgaaggtacacactttatctttatagcgtttcaaaatgcttcgcgcgtttttcgccccgaaatcctcccaatgcagcaatgcattcggaaatgtttctctcgccagcgcaacgtagtcgtcaataaattggtcatagcgttcgccgcgcactctggaatgctggttgccgacataaagcgggtcgttcaagaggctctcctgatttgtccccgcatctaaaacaactgccagcactctgctcggatcaatgcccgcagccgctgtataaaccgccagcttgccaatagaaatcgcgattcctccgacgccccagtcaccgattcctaaaattccttccgcatcagtggcaacaattaaatcgatcgtatcgctttgatctttatactgtttaaatgcttctttcataccgtccgggtcatcgattgacagatagagccctcgtggttttctgtattcatggctgtatctctggattgccgttccaactgtcggtgtatagacaatcgggagcatttcccctaaatggtcatttaacaggcggtaaaacagcgtttcattccgatcgtgcagcgccgttaaatagacatttttgctcaaatcgtcaggctgtgcggaatattgttcatacgctcttttcgcctgatcatcaattgttaataccttgggcggcagaaagccttttaaaccaagttcttttctttcttcctcagtaaaagcaacacctttgttcaaaaaaggaacagagagcacttcaaggcctcttaatgttgtttgaatgtctccttcgtttgttactctgaattgtttcaccctgcctcttcctttctgagcataattagtactaggtttgcattattagccggaaaacatgcagggtaaacataaaaatatgctatcgcttcattcgcttaactgactttttgatacttccgtcctcctcccattgaagggcgcgatactcggcatcatggtaaaaaataaaccaagcatctttttctgctgcgaacgcctgccatttctgcttttgcgggatagaggtcatcggataatcatcgtaagccagcacccatagcggattgcggtgggcatgtgtcggcatcagatctgccatatgtacggcagtttcacccgcatcctcgcatatcaggacactgtgtccgtcgctatggcctccggtgtgatgcattgtaataccctctgtgatcgttaaggtgtcttcaaaggttttgacttggccagctacagcctcccaattttctttccaatacgtatttttcgacctgatattcggatggcgcatttcgtcccattcaacagctgatgtataaatcactgcattcggaaagacagagacgagccgttcaccttcatattccgttaaaccgcatgcatgatcaaaatgaaggtgtgtcattgcgatcacatctatatcggcaaccgttaatccgagtgcagctaatgagggtttcacattcgactcttgtgtcacgccatagtttcgtttttgtttatcagtcagcttgccgtacccaattccggcgtcaacgatgatattgagcccatccttttgaatcaaaatagggtctgtccttagttcaatctggtttttttcattgactggatattttttagaccaaagcggctttggaacgacgccgaacatggcacctccgtccatatgcgtcacgcccccgtcaagccaggtcaacgtgatattaccaattttcattgtttccattttcatcccccctgtcatcatggtagcaaacggcccataaaaaaaacagactcctgtcagagtctgtctttacgttctccattcaacctcagcccgatagatcggctggccgagtgcagagaatttttcttcatattctgtcataatattgccttccagattgctgttatgcaaatcgaggctgacgtatgtcagcagcaggccgtactcagagaagctcttcaaagagtactcaaataaacctcggttgtccgttttaaaatgaatcgatccgcctttgcccattacttcttcatattttttgaggaagtgggaatatgtcaagcggcgtttttcatgccgtttcttcggccaaggatcagaaaagttcaagtagacccgtttcacttcccccggctcaaacacatccgtcagcgtgtccgcatctatattcagaagctttacattctgcgcttcgctgtcttttactttttggacggctgtcacgatgacgcttttaaataactcaataccaatataattgatgtcgggattttgtttggccataccagaaataaattggccttttcctgtaccaacctcgatatggatcggattgtcgttgccaaacactgtgttccatttccctttataatcagcaggattgctgatggcaatatctgcgttttcagccaaaaagtcatcagcccaaggcttgtggcgcattctcatatgattgacacctctatctattatttcgactaacaacataccatgaattaaaaagacccgcaagctcgtttttccagtgtatctctcttaaggccgagcgcataaaaaaagagggtcccgtctgctggaacactcctttcacatgtataaaaacgctctgttttgaacaatttaacccgtatgatactgaagggatgtgtaccgttatgggtttacattatgagcatcaagttcatttattgaaggatatcttgactgaccatcaattggactgctgcggaacagtcgcagagtacgagcagcttgagcgtgtgattaaatcactgatggcaaacaccgagcttgattcaaatttcaaaaacgtgcttgaagatgtttaccgctacagccaatcaggaatatcgtccaaatccattgactcacacatacaagagcatcagaacagcctgtctcaatgggtagagcaaatggattcgtattcctgattaatcaacaattcgtttcatgaggatatgcagctcttccattgcatcatgaaattccttatcattgccttttgctttatgccaggcaatgaaagtaattgtttcagataacacataccaagccattcgcaaccgaaggctttctgtcagctctatgccgtacatgctcagccagctctcccaagctggcttttcgacgtagtggtacagcaaaggcccgaggtccatcgccggatcagcgatcatggcgccgtcccagtcaattaaatacagctggttgtcttcagacaatagccagttattatgattgacatcacaatggcaaacgactttctcaccgaaatgcacttcatgcaggtgttcttccaaatacttgatcccttcttgaatcagcggcgaagattgctgcacagcaaatacagcctgcttcagctgagacaaaagagcccccgggttcagcggttcttttccaagtctcttcagcatgtccagcaaggcttttgatgtgtgtattttacgaagcaattcagcaacgggccgtccgctcatgtctttaggcttcagctctctgccggtcatccagtgctgggccgtaatgacgtccccattttccatccgttttgtccaaaccagcttcggaacaatgccttcggcggataaaacagctaaaaaaggtgagctattacgttttaaaaaaagctgctgcccgttatgtttcgcataatatgcatctcctgtagctcctccggcggggaagatctcccaatcgctacctagtaattgtcccaaccagttcatatcaatgttcaacccatcatttcttaaaatattttagaattaaggctaatcgtttctagtctatccagcgaatgcctttttcgtacgaatcgtataaaaataaaaaagacagctattgagagtctcatatgctaatcaatagccgtcctttaaattttagcgctatagcacaaacttcgtcaagcaaaactcttaagatctgatgctaaatataagataaccgttccgatgccgtttactgcaaccgttttcttgatttctgccgggtcttcctgaaatcctgatggatcacataaaagccgataaggtatgtcgtttggcagcctccactcgacggagtctggactcgcgtgatggataacaatgatatctttccattcgtcaacctcgtcaagatcataaagcctgtatgcgataaggtgttcttttagcgtcaagcattcaagatggcgccggatgtctgcagcggacctaagacggaatgcaggatgcgcttttctcagcgagatcagcctgcggatatagtgaacatcttctttgaatgtttcgcggcgatcccagtcgagctggttgatgctgtcactggattgatagctgttttccactccctgcttcgtccggaaaaattcctgaccgctgtgaataaacggcaccccttgggcaagcaaaataatcgcggctgcaagcctttgcctgcttcgctttcggctgtcattttcttgaggaagcgcgaagctcattttatcccaaaaggtgtgattgtcgtgtgattcgacataattgatggactggcttggttccggaacaatcggtgctaatgccttccatccggaagacccggcaattccatgcatcacagcttgtgctgattcactgctgccgagcgcaaaccctgctgccttaaggtgaaaggtgttcccttttacagcgtcacgaaacatatcattaaaaaagccgatgcccggcattcttggcgcgttcgccaaagcagctttctgttcatgcggcagcggtgtagccagatcccacccttctccaaaaagcaggattccgggctttgccttagttgctttctctttcatataaagcacggtgtcaatatctaaaatcccgaggagatcaaagcggaagccgtcaacgttgtattcttcaagccaatagaccacgcaatccgcaatgaactttcttgccatccttctttctgatgcgatatcattgccaacgccggtgccgtttgatggcatcccacattcgtcgtgccggaaaaaataacctggcactgtcttttcaaagggggaattctccctcttatacacatggttaaaaacaacatccagaatgactcgcagaccgtgctgatgcagggtattgatcatttgtttcagctctgtttttctcgtttgaggatcatgagggtttgaggcatagcttccctccggggcaaagaaatgaagcgggttatatccccaattgtatgcatcaagcggcttctcttcatcaactccggcaaaatcgttcaccggctgcaactctacatgagtaacaccgagctcttttatatacgccagtcccgaagaactgccgtttgcggtttgtgtatccgtttccgtcagcgctaagtattttcccttgtttatcatgccgctgttttcatggatggagaagtcgcgaaggtgcgtctcatagatgacggcatccacagggtgtgagaatggtttaagaggagcagtccatttcatttgatccgggcgcaagacgacgcccttctctccatttacagtcacagccttggcatacgggtcaactgtttccatccattctaaattgttgcagatgcaaaacaaatactcatacccgtgaaggtcacccgtgaccgtaacagcatagacacccttttccaagcgattcatttggaatgtgcgcccgcttttattggggtgtgaaagcttgacagcagctgaggttgcagcaggcgcccatactttaaatacggtatgatccgcggtataaacggcgcccagctctccgtcataataaaattcgtcatcaaacgcagccgtccggatgaccgcgccaatttggagatccgttttgtggccgctggatgctctgacgcaatggatttttccaaatgtcacaggatggtcggatacgcagacgtacttgtattttgcttcaagggagtattcctccctgacagccagaggaaaaactgttgtttctgtctcaagccgaaacggcggtgtcatgatttccttttgttcagcaggaatcagaacagtaatgatattcatatcatcgacatacgcttcgaagctgcggcggatgctgaccatcggaagctctctcctccaaacacgtttatgttttgatccttaggggtgaaggactagatgccagacgaaacggggtagtgcccatgatttctccgtcagcatggaacgggattttgtccttcgtgtaaaatgtaatgtccttcgctttaaacatcgtaacgccatccatctttgtatgttttccaaatgccatgagacataaaagccaatattttttcaaaaacggctggttttcaacgattacgatatcaaatgtcttctcgcgcggatttgctaggggcgccgccttcatgcctcccccgtaaaacggatggttggatacaacggcaaaccagacatcatgaaattcgcgcgtctcgtcttccgtcgtacaagctaacgtaaacggcttaaaggttgccgaagcgtgcaaatgagaaagcggatacacaagaaatcgaaggcggagaaaaagaaaaacccgtctcaacggaaattccatcgcctttttattgacatatgcgtcaaacccgatcccgatgtgattcataaaataaagaatctgtgatttatcctgaaggaaattgacgctccctaaatgaaaggttcttgttaacgggcgctttaccttcttgatttcctgtatcagatcgatttttttaatagagaaccctcgcgaaaaatcattatacgcgcccgccggcacaaagctcagctcaatatcgtcaacatctttcagcccgttgacaacttcatgcatggttccgtctccgccaatgacgatcaggcgcttcagcttatattcctgtatcgttgaaatctgtctggcgagcacctcggcgtgtcccggatgttcagttaaaaatgaacggtgctcaacctttcgtttgatcaattctttttgaatggacttccaaacacgcaggccgtttcgatgtcctgctgtcggattaataataaaaaaccaatggctcatctttctcacctgcttatgttatgagaaaaccgctcaaatcgttctcttttactccagccactcctgtctgcgataggagtcagacatgcagtaagacaatagagcctttgcagcctttacctgatgatgtttgatcggagcagtgtttttcttctgccgctcaatccattcttccgcgctccgcttatccgctatttctaagccgtatggcggctccgggtaatcgatgtacgacgttctgctcagaagcaattttcgaaccggaatctcagcctgtttttcctttacgatctttgacacaaccgagtccgtacgaaacaggctaagccctggatttaacactgatgcagtctgagaggctgttttcttgtcccaaaaacgatttttagaccctatgtagacactgtcttcctcagcctctaaaaaagaaacgcaataaatttccagaggagaaataatcacaatgcttaattcaaccgccgcctgctgaattttcagcacaggcttatacataataaaataagaatcaggcagctgctgggtcagataacgcaaaatgcggtcctgcttcacttggtttgagagttgagatatttctgaaagagtagagcttgcccatttgagctgaaaatcatataaatgccttttataaaaagaagcaagcgccaccctgctcttcgggagccttacatgaatatcttcttcgtcctcaaaccattggtgtctctcttcttgtatatcggcttttatctcttcttttcttcttttcaatgaaaatttttttcgtttctgcaccggttccggttcttcagcactggcttgcctttcttcatgctggcgctccgctgcttctactagtgaaagccagcgctcttttttcaaacgtacaaactggttgatataatggtacggatcaagctcatatctcgatatataatcatgaattttgatgatttgtgccatgtttgtttctccactccgcaatgaattaagataattgaaatttgaatatttcctcgtattttggtgattggttcaagtgtatttgaaagagcgaaaatcgttcagccatcatcgaaacctcgccgctttcaaacggaacatgagctggaaatccattttcgcctgtccattttcttgccagcgtcatatgaggatgatacggtcttttttccacttgaaagccggcctgaaggacagcctgcttcgtatgttcccgcagtctatcaagcgttttgtttttctttggctccagatgtaaaacgcgcggccttctgcggtcgccgaatacatctatcttgtcaaactcaattgaaaatgggtcaatttctgaagcaatctctgctagcgaaccttcaagcttctttatttgtgtctcatccgccgctccgagaaaaattaacgtgatatgatagtcaagcgggtgcacccatttttgaaacgtcaataccggttcgtttttcgcagcctggtagatcggatttgcaattccctcaggtatgggaacgccgatgaaataatgaggccgtatatctggcatccgtctgacactcccttctttgacagctattattttatcaataaagaggctgtgcggatagaggaacagtgtatgaaaacactctcgcacaaacgtttattatgttaggatattatatgacacttgttttattcagaaaggaatgacaatgttgaaaatcgttgcaaacacagctgatctgataggagatacaccgctagtgagattgaatcggcttcagccggaaaatgcggcacaagtctatttaaagcttgaatttttcaatccgagcggcagtgtgaaagacagagccgcttatcaaatgatcatagaagctgaacaaaacggtttactcaagccgggatcagttattatagagccgacaagcggaaataccggcatcgggctcgccatgaatgcggcagcacgcggatataaagcaatcttagtgatgcctgatacgatgacgaaggaacggatcaacctgcttaaagcttacggcgcagaggttgtattaactcccggagaggaaagaatgccgggcagcatcaaaaaagcgaaggagcttgccgaacaaattccgaacagctatattccaatgcagttcgataacactgccaatcctgatgcgcaccggaaaacaacagcgcctgaaatcgcccgggcaatagaggaaatcggaaaaccgctcggcgcttttgtcgcctcctctggaacgggcggaaccattaccggaacaggtgaggcgctcaaagagctttttccggatatcacggttcatgttgttgagccagcgggttcgcctgtattatccggcggaaaacctggcgcgcataaacttgtaggaacgagcccaggctttataccgccgattttaaatgaggacgtttatgatgaaattatcaaaatctctgatgaagacgcgtatacgacgacaagacggcttgctgctgaagaaggaattcttgtcggtccttcatcaggcgctgcctgcttcgcggcaatcgaaacagcgaaacgcctctctcctgacaaagttgtggtctgcatgacagctgatacaggagaacggtacttatcaactgatttatggtcatttatttaaaaaaaggactggcttcagcagaagccggtccttttattttgcaagctcgtaaatggcctgagcatataacgctgtcgatctcagcaggtcatcaatttcgatatattcatccttttggtgtgcgctgtcagggcgtccggggaacagcgggccgaacgcgacaccggcttttaaggatctcgcatatgtccccccgccgattgagattaagtcagcttttttacccagctggccttcataaaccttttgcagggttttgactaacggatgatctgcggacacgtgatgcggcttgctgtctttgaattctcccagatcaaattcagatgcactttcgaatgcatcgcgaatcgctttgctttctgctgtcacaggatagcggatattgatcccgagctcgcctccttgcccttctttatagcgcagtgtgccgacatttaatgtcagctcaccgctgatttcatcctcacagtcgatgtccagtttttttcctcttgtatcacctgagaacttatctgtcacaacttgcacaaaccgctttcctgcatcgtcaagctcagtctgctggagaaattcgcacaataaaatgccggcattgatcccattgttcggttccatcgcatggcaggaaagaccgtacatacgcaaaatgagctgaccgttctctattgcagcttcccctttttggtccgtcgtgcggagcatgtctttaaatgaagacagaatctcttcttttttcggcccttcaatgacagcttccgcagcgtcgggcaccatgtttaagcgaaggcctgattgaaacgagacaagcactgcctttggttctgcttgatttgggcggtgcggtataagtaaagaagcatcgatgatccctttttccgcattaatgattggaaaatcggcgtcaggcgcaaagcccattgttggcatttcttcatgcttgaaataatgctctacgcatctccaatcactttcttcatctgttccgataatcattctgactcgcttggacaggggcaaattcatgtctttcacgattttcagcgcgtagaatgccgccattgtcgggcctttgtcatcaatggcgccccttgcataaatccgtccgttgcggatttcagctgaaaatggatcactcgtccatccatctcccggcggcacgacgtcaacatggcaaagtacgccgataatgtcatcgccctccccccattcaatatgacctgcgaagccgtcaagattttttgttgtaaagccttctttttctccaagctccagcaatgaagtcaggctggcatttaccccttctccaaacggtttaccgggtccggcggttgtttcgtccatgacactgttgattctcaaaaattcctgcgtatcacgaattaaatcctctttttttctgatcacttcaacttcccagttcataatgatcccctttccgcaagaaatgacttgcaaaaaccaaataaaacgaataatattaatggtgttttgttaaaacgttcgtaattggaggatactatgtttcatctaaaagagcagcaaacatccataaagcaagaaatcatagcagggctgacgacctttttcacaatggtctatatcgtcgtggtcaatccggtcattctggctaacgccggggttcctttcgaccaggtgttcaccgcaacgattattgcctccattgtcggaacgctgtggatggccctggcagcaaattatccgattgctattgcgcccggcatgggcttgaacgcttatttagcctttcatgtggtaagcgcaagcgatggcggcatcacgtacgcaacagctttcagcgcagtatttacagcaggggttctcttcattattctatcgttaacgcctttaagaaaacaacttatagaagcgattccaaacaatttaaaatacggaatcacaactgggatcgggctgtttattgcttttatcggtttgcgtcaagcgggcattgtggcagctgatgagtcaaacctggtcactctcggcaatctgcattcacctggtgttattttaacgctggtcggccttttgatcagcgtggtcctgatggtgctgaatgtaagcggcgctttatttatcggaatggcagctaccgctttgatcgcctttttcaccggtcagctccattttccaaagggatttatgtcgcttcctcatttgccggaaggattgatgatctcaaatccatttatcgcttttggcgatgtcattcatcacggcctgtacgctgtcgtcttttcttttctattagtcaccatttttgatacgacaggcacgatgatcggagttgccgagcaagccgggctgatgaaaaacaacaagctgccaaacgtgcgaaaagcgctgcttgctgattcaaccgcgacaacagtaggagctgttttcggcacaagtccaacgactgcatttatcgagtcttccgccggtgtcgcagctggaggaagaacggggcttacggctttgactgtcgcggtgatgtttgcggcttcaatgtttttcagtccgcttgtcagcgccttgtccggtatagccgccatcacctcgcctgctttgattatcgtcggcagcctgatgatgggttcagtttccaatatgaactggaaagagatggacgaggcatttccagcgtttctcgtcattctggccatgcctttgacatccagcatttctacaggaattgcgcttggctttatttcatatccgatcgtaaaagcggcgcggggaaaatggagagagattcatccgctcgtcatcgttttcgccattctgtttttcatccagctgtttattttataacatagaccaaaaaacccaaacgtcgccgtttgggttttttatgtaaacaataaagagacagcggccgctaaaaaacaacaggcggcaaacgcatagtgcaggatattgatacagctttttctggcccgataatattcatcactttccttatcggcgccaattaaaaaaggggcatccatgaccttgtcaaaaataagcgtcaggatataacggcaaacccctgtgtatactagcagcgcaatcaccttcagccaaattggggaaacaaatatgagaacagtgaaagctgacaatagcatgtacatctgcctcgcatactcgccattcctcagcatgactttaaaaaacaattccttatagcctgtgcagatcgttcgtcttttaaatatcctttttgaattacggtataataacggttttcttctcatcctgtcttttacttttggcattcccgcctcctgactcatcatcatcacaagtcctgcaagagcaagcctgctttttttctcttcagtcacctcagcttcaaaagccgtgaacgaagccgtctttttcaaactgcggataactgagaaaagcaaaaataaaatgccaaaaagcgcaagcaagtgccactgagtcaaaacaatcaggatagcagaaccagcaaaaaatatagctctgacaaaaatatcgccaatccatctcgaaatggagcgcggctttctgatcctgtcttgctttaaggataaaaagaatatatgaaggccaaacaaataagacaatagagcagtgctttctgcgaatgtgatgtgaacagaatgactgataaggggaaggacaataaaaaagagaagcagccatttagccagcgtgaccagaaaagaatacaaaagcgcgtaccgtttgagctgatagatgatttccttcttttgcagcaaaaacactttgtccgcttccattaaaaatgtacgaatcgagcctgtaaacatgatcagcccacacacagcgtacagccatctccactccgccacttcagaccactcataaagaaggcctcttccattcatcaaatcaatatactgatagatgacaaaagcaatcgccggcaaaacgatgtagagagcgactgtccagtcaatgaccgcatgcaacactttaaactgatacttgtaatagtcaaacagccttcgaaaaaagagcgtacgcccgttcatggccgatcaccttgaactgccttataaaaacagtcaagcaatgactgcccctctaatccggtcttgtcctgaatatcttttaacgtgccttggagaaataatgaacctttctcaatcatataaaaccggtcacagattttttccgcggtatcgagtacatgcgtgcacataagaattccggctccacgttctttttcagccttaagcatgtccacaaagcgtttcgtcgatatcggatcaaggccgataaacggttcatcaatcacatacatatccggcttagagagaaaggcctggataagcattagtttttgctgcatgcccttcgaaaaggtgacaggcagctcatgtttgacatgatcaagcgaaaacgtctgcagcaggctttgggcccgatgcgcaaattctctctcttcaatgccgtggagtgtgctgatcagatccaaatgctcccacagcgtcagttcttcgtaaaaggacggatgctccggaatatatgcaaatgaacagtcgttccaggcaatatgccctttaaaatcttctgaaaggccgagtatcgccttgattgcggtgctttttccggcgccgttagctccgatcagtccaaccagctccccttttctgacttccagaaaaacatcggtgagcactttttttcggcttgtatacccggcctgttctattgaagcttcaagcaaatttgtcaaaactcacccacctccaaaatttactacgaaacagaataaaaaaagtttctttaaccataataatattgagccgaaatacatagtaatccaacaaggatggctgcccaacgcgaattggaaaaaattaataggagttatccctagattcatcactgcaatatcgtgtataatgagggcgaattattttaacagttacagatgtctgcctttgttgctatttcgtacgcagttgatagtcgtgagttgtggttagtcaagtccatccgatcttatgatagggagtggttttttgaaaccttcaacaaaccgtatgctaactcgaatcaaatcagtttacatgtttatccaagaaaaaggtcttgtgacaacacaggaactggttgacgaattcggcattacacctagaacgattcaaagagacttaaatgtgttggcatataatgatcttgttcatagtccaagccgtggcaagtgggagacaacgagaaagaaagtaaagattacctcataaattgaaaaattacatagggccgcctgagagcggtccgatagataatagggcgaagaaactactgagccttgtttttgtgtgcttataaataaaaccccgcattcggtatgcggggtttttgtcatgcttgcggctcattgagcaaatgaagctcttcctctgtcagctcacggtattctccgggtgccagagcgggatctagggaaacgcgtcccatcgaaagccgcttcagataaaccacttcattgccgacagcctttgccatttgcttgacctgatggtattttccttctgtaattgtcaggtatatcacggtattgccactgtcgtttgttttgatttccgcttttgccagctttgttttatagccgccctctatgtagacacccgtttccaaatcggagatgtcttcccgagaaatctgtgattttaaatggacttcatacgtttttggaacatgctttttaggagaaaggagccgatgtgcgagctgcccgtcatttgtgagcagcaaaaagccctctgtatctttatcaagcctgccggctggaaatggctcaaatctcatctcctccggcgtcagcagatcgaccactgtttgctgccggctgtcctcagtcgccgacagcacgccctgcggtttattcatcataagataaatgaactctcgataatcaaccggttccccgtatacggtcacctcctgcgtatcaggatcaacgtgcgcctttacatctttggcaggtttgccgtcgatcatcacggctccagccttcacaacggctttgacttcttttctggaaccatacccgctgttggcaagcagcttatcaagtctcattcccaatctctcctttataaaagaaagcccgcagcatgcgagccctcagtttcatcatatctagttcatcagcctgcatgtctgcctttctttaagaaacctggcaaacggcggcctaaaattttctgtaaaaatcctaatcggtagccacaatacaggtagacagctccgccaacagcggccgcgatcaccacaacaatcgcagcttgcagctggccatcctgataggaaataaagaagcctaatacccactgcacgattttcacggcaatacccataatggctgataagacaagcatcaaaacagttcgtttaactagtatcttatacgaatagcctgcatggcgcttaatcatgataaacccatataaaagggaagcgatatatccaagcgccgtcgctaaaatcgctccgtcagcctgcatcagcttgatcagcggaacattcagcacaagcttgatcacgacgccgatcacaaggctgacaaccgcaaatttttgcttattgatgccctgcagaatggctgcgttgactgtaaacaaagagaacagaattgcgactggcgaataccatagcaaaatgtttgcccccagttcagggtgaaggctctctgacccgtaaaagaacgtatacgtcggtcctgacaatagagagatcccaacaacagccggaataattaaaaacaggatcgtctgcatcgtttgattaatctgctgatttaacagcttatagtttccgcttgtaaacgattcagtaatcgttggaattaatgtcagtccgaaagcagttgctagggaaaccgggatcatcacgagcttctgaacatacagggttagaatcgcaagcatgtcttggctgatggcttgatgaccggcttcaatcatcgctttgttaaacgtatttgtatcaatatagttatacaaagggatagctagtccaacaaaaacgtacggagcagcatagctgaacagctcgaaaaacattttcttgtagcttaggtttgctgtcggacccgtattcggcatcatcgccagcaggctgcccttccgtttgttccaataaatataaagcacgaccagccctccgaaggcaccgatcagcgctgcgaaggttgcatagccgacagcgatgacaaggccgccgttgaaaaccttcaaaatcaagaatgtcgcactcaatagaaagatgatgcggacaatctgttcaacgacttgggaaacagctgtcggacccatcatttggtgcccttgaaagaatccgcggacaaggctcataatcggtacgaccaatagcgctaagcttaccatgcggatgacataaacgacatgatcaattgtcaggccgttattatccttgcctcccagcgatatttccgcaaacatcggagccgatagatacagaatgaaaaaggctatcattcctgtgacgagcataaccgacatgcccgccttgagcattttcctgcttgtctcataatccccttttgaattatatttggaaacaaatttagaaacagcggccggaaagcccatcgtagcaatattcaaaaataaagtgtattggttgtatccgtattgaaataatgcaccgcctgtcgccccgaccataatgctgaagggaattaaatagaccatccccagaatccgcgatatatatgtaccgagcgttaatacaaacgtgcctcttaacagtttgcttgacatgtttcttcatcaccattttctacgaagattcaacttttctattttaccacaactgggcatttagacggtaataaatacaaaagcaatcctgtgaacattcatgtccgcggcaaaagacgtttaaggagcggctttctttcgctataatagtactgcggacggggtgtccgcacacgaaatgaaaagaaagttgatgataaagatgaaacaatatgacgtaattgtaatcggcggaggcccttcaggcttgatggctgcgattgcagcaggagaacagggcgctggcgtgttgctgatagataaaggaaataaattaggacggaaactcgcgatttccgggggcggccgctgtaatgtgacgaaccgccttcctgtggaagaaattatcaagcacatccccggcaacgggcgttttttatacagcgcgttttctgaatttaataatgaagacattatcaagttttttgaaaacctcggcattcaattgaaggaagaggatcacggccggatgttccctgtgaccgacaaagcccaaagtgtcgtagacgcgctgttaaacaggctgaagcagctccgcgtaacaatcagaacgaacgagaaaattaaatctgttttatatgaagatggacaggcagcagggattgtgacgaataatggcgaaatgatccatagccaggcagtcattatcgctgtcggcggtaaaagcgtgcctcataccggaagcacgggagacggctatgaatgggctgaagccgcgggccataccataacagagctgtttccgacagaggttcccgtcacttctggcgaaccgttcattaagcaaaaaacactccagggcttatcactaagagatgtagccgttagtgtgttaaataaaaaaggcaaaccgattatcacacataaaatggacatgctgtttacccatttcggcctctcaggacctgccattctcagatgcagccaatttgtcgtaaaagagctgaaaaaacagcctcaagtgccgatcagaatcgacttgtatccggatatcaatgaagaaacgcttttccaaaagatgtataaagaactgaaggaagcaccgaaaaaaaccattaaaaacgtgctgaagccttggatgcaggagcgctatctcctattcctgctcgaaaaaaacggcatctctccgaacgtatcgttttctgagctgccgaaggatcctttcagacaatttgtaagggactgcaagcagtttactgtcctcgcaaatggcacactgtcgcttgataaggcatttgtcacgggaggcggggtatctgtaaaagaaattgacccgaaaaaaatggcttctaaaaaaatggaggggctttatttttgcggtgaaattctggatatccacggctacacaggcggatacaacattacctccgcccttgtcacaggcaggcttgcagggctaaatgccgggcaatacgcccgttcttaatcattactctttaaatctcttgccgccaaactcacatttgaacattccccgcattcatgttagggtgagacttgttttgtttcacctgattgcggggtaattttaagagaggaatgagctgccatcgtacgaccatactaagcctgcgagcaagatataggcgtacacaaaaaattagagggtgagaaatgttgaaacatatatctagtgtattttggattgtgattgcaatcacagctgcagctgtattatggggtgttatttctcctgacagcctgcaaaatgtgtctcaatcggcacaagcatttattaccgattcatttggttggtattatcttttagttgtctctttgtttgtcgggttttgtctctttttgattttcagcccgatcggaaaaatcaaactcggaaagcctgatgaaaaaccggaattcgggttattatcatggtttgccatgctgttcagcgcaggcatgggaatcggcttagtattctacggtgcggctgaaccgatcagccattacgcaattagctctccatcaggtgaaacagaaaccccccaagccttcagagatgcactccgctatacgtttttccactggggtttgcacgcttgggccatttatgccattgtggcattatgcattgcctatttccaattccgcaaaggcgcacccgggttaatcagcagcacactgtcaccgattctcggggataaagtaaacggaccgatcggaaaggccattgactgtattgcagttttcgccactgttgtcggggtgtcaacaagtcttggtcttggcgcaacccaaattaacggcggtttgaattacctgttcggcattccgaatgcgtttatcgtccaattggttttaatcattattgtgacagtgctctttttactttctgcgtggagcggactcggaaaaggaattaagtatttaagcaacacaaacatggtattggccggattgttaatgttgtttatgctcgttgtcgggcctacagtgctgatcatgaactcatttacagattctatcggacaatacattcaaaatatcgttcaaatgagcttcagactgacaccgaacgatcctgaaaaacgcgaatggattaacagctggacgattttctattgggcatggtggatttcctggtctccatttgtcggcattttcatcgcccgtgtatccagaggccggacgatccgagaatttttaattggcgtcttggtgacaccttgtattttgacatttctatggttctccattttcggcgtatcagccatggatctccagcaaaaaggcacgttcaatgtagcaaagctgtccactgaaacgatgctgttcggaacacttgatcactatccgctgacaatggtgacatcgatccttgcattgattctgatcgcagtattctttatcacgtctgctgattcagctacattcgtgctgggcatgcagacgtcgtacggttctttaaatccggcgaattctgtgaaactcagctggggtatcattcagtccgccatggcggctgtgctcctatattccggagggcttgccgctttgcagaacacagcgattctggcagcgctgccgttttctatcgttatcctgctgatgattgcctctctctatcaatcgctctcaaaagaaagaagagagatcaaaaaagcggagaaactcgataaaccgagaagtcctagagtgaaaaaagcatattaacaaaaaagatctttccgcgcctgcggaaagatctttttatttgcgatataaaataagggcggaaaaacagtaaagctgctcgccgtctgggtcgcacgcggccgaaaccgtatatttgatatcaatcagctgctcctccgatatcccttttaaaaatgaattgatttccgtctgtaagtctttttcatgctcttcatcaaataccgctaccttcagcattttatccgctctcctttctctatcaatctattccgtttggaacagcgttatgatagagaaatgatgattatctcgtttccggataaaaagctttccgtatatgggattccctctgtggctcgccgccttgctgctccactttcagcagcacggcataaacaatgcgcatatgacagtagctgataaggctgacgctgaaaaaagggacaatgcccggcaggtacgcaagcaagaaaaaaagagcaacagtcagcgcaagcatagcaagcgtatattgcaaatacgccacactgagcaagagcgaaaatttcacatacagacgttttttccagtcaaaatggacaagcagcggaaacacataaaaaagcatggatacgaacaaaaagccaaatatcataatggcgaagcgcaggatgtgcagaaggaaatgacttggataaatgaaggccaaatcaatataaatgatcactccgatgagcgccagtacagcgccgagcagatttgaacgaaaaaattcacccttatattcctgccaaaacgttttgagcacgggaacgttgtcctgcccctgaatccacttccgcatgacagcgaataaagccgcggtcgcgggcatgatgccaaacacaccgagaccgagcaacgtaaaaaacagccacagcaagtttgtatacgcaaatctcatgatccattcgcaaaaacgcagcatccgtcccagtgagccatcatgttccatggcgccccctcctttttttgcattatacattctgcatctgaaaaagctctttcatgccgatcggcttcttttcggcaaccgagcgccacattccctcaccaaccgcgatggagtaggctccagcttcagccccggctaaaatatcatagcggcgcagcgggtcttttcctaaaaaaagatcctcaagcaaaagcggatcacctccgccatgccccccttcatttttgaccacttgtatcgtctgctttgattcaaaaagcggatagtattcgattgtctgctcaggaaaagcaaacggaattctggaaggttcgtgaaattcatttgattcaatacgcccttttgtgccgttgatcgtcagccggtagccttcatacggtgccgaaaaaataatcgagtagcttaacagtgcgccgccatcatatttgactgccgccacgtacgtatcctcgatgtcaatttcctcgtcaaaaatacacgcgtcaggcctgtatgcagtatataagctagactggtctcctgcttcgagatgatcatcttttatagaagctttagaggaacggggatgccaccttgaatagtagtggcatttttctttaacacggcacgtcccgcaaaaacgcccgtcttcttccggcaaggggttccactcactgtccggcccatagtaattcaaggcgccataagcaaatacctcttccggattttgcccgagccaccaattgacgagatcaaagtgatgtgttgatttatggacagaaaggcccccggaaaactgtctcgacctgttccagcgtttaaaatagctggcgccatgatacgtatcaatataccaatttaaatcaacggaggtgaccctgcctatttttccgtccagaatcatttcttttattttccgatgaaacgggctgtagcgatagttaaacgcgacggtgacttttccttcgcttttggcctccgcttcaagcacccgattcgcatcctgcactgttgtcaccattggtttttcagtaattacatctgtatcccactgaaggctttttacaatatatgtgacatgcgtatcgtccctgcctgccacaatgacgatatcaggctttgagacgcgcatcatctcgtcaaaagcatcttcgctaaactcaggcacgtgggccagctcgggaaatttctttttgcaaacggcaaaacgtttcggatcggcatccagcaatcccgtaatctcataatgagttgaaaaccgctccaacagcggtttgataaacatactgaatgctctgctgctcaatccgcaaaagacgatgttcttcaatatcctcacctctatcgggcttcagttagttgagaaatcagctgcagcgcttcctctgttttttcagcatacacagggataaacgccgccatatcgcgattcaatcgaaaagaatagccgttcagctgttttttccctttttcgatctgaacggcatagatcgttttttctcctgttttattattaacagttgtataaggagatgttttttcaggaggcaatccgtttaacggctgaaaattttccggatcattgtaagcttgaaacatgtcttcaggcacgatgaaaacatctccctcatgggcggtaatttcagtcagcagtttttcctgaaaagctggaaagatatcgaccttcccagcattctgctcggcggccttttttattttttcctgtacgccagcctgcatatcagaaaagagaatgacatgcattccgtccgtcctgcttgagcatgatgccaaaaagagcactgagacgatcacacacaaagccgtacgtatcctttttgtcatttccccgctgacctaaaaagaggctccagctctgtcatagctaaaataaacgcgccggctccgtgcagatcgtttttgcttctttcgcggctgacataatagtcatagaaaccggctgacgttccgacacatatgtctttgacgagaaacgcgccgtcttctgatgtttcggttttatgctgaatcaagccttgatacgcttttagcagtgttgtttcgtaagctctgtctaaatagcctttattgattcccttcgcaaatgcgtacatgtacaggcaggatcctgagctttccagccagttatcagacctgtctcccttatcaacgatctgataccataaccccgtctctttgtcttgatagcggcagatgctttccatcatgtcctgcagcgtgtttttccacccatgacggtttggatgcttcttcggcagctcttcaatcatgtcagcaagagacatgacgtaccagccgatggaacgtgcccaaaattccggtgaacagcctgtctcttcattggcccaaggcatttttttcgcttcatcccaggcgtgataaaagagtccgttttttgcatccttcgtatgctttctcatcaatgactcctgcagcacgacctgatcaaacagctccggctcctgcttcagattggcatatttcagtgcgaacggccccccatgtataagccgtcaagccacatttggtatggataaccgtctttgtgccaaaaaccgccctcagacgtccggttcagtgttccatataaaccgcgcagcctttttgccgctttggcataccgttcatccttcgtctgctcgtataatggaaaaagaatgagacccgcttgaatggcgtccagttcatctcttctaaataatagattgccataatcatcgattaagagatctgcataggccttcgcatactcaaaataccgcttttccccggttgcttcccacagccgcaatacaccgcataagaaaacaccctggtggtagtgccagcggtttgcaggaggcagctcctggactgtgtacgtattcataatggtttttgccaatgcctccgcgtacgtaagaggcgattttacagcgattgattgatccattgatcccatccctttcttaataaattccttcctcgccaaatttcttcgctaaacgattcgcaagcatgaccaaaatcagcccgaccgccgctttaaatacgccgactgctgtactgtagctgaattgtccctgtttcagccctgcagtataaacgtacgtatcaaaaatttccgccacttccctgtttgtcgcatttaacagcaaatacacatgctcgaagccaagctccagcgtgtctccgattttcaaaatcagcaaaacgacgataacgcttttaatggcgggcagcgtaatatgccacatttgccgcagccgtcccgctccgtccattttcgccgcttcatacagctgggggtcaaccgctgtaatggccgccagataaatgatcgtcgaccagcccgcttccctccagataacctgaagaatatacaggggccggaaccattcttcgttcagcagaaaattgattttttcaccgccaaaaaacacaatcagttcattaatcaagcctccgtctaccgttaaaagcacaaacgaaagcgatacaacaatgacccaagacataaaatgcgggatataaatcagcgtctgaacaaattttttaaagagagcaatccgcacttcgttcaatagaagcgccagcagtatcggcaccgggaaaaatatggccaggttcaaagcaaataacacgagcgtgttttttaacaagagaaaaaatgtaggctcagtaaacagcctgataaaatgcttcagccccacccactcactgcccaaaatgccgaggaacggctgataatcctgaaacgcaatcacaattccccacatcgggacatacttaaaaagcaaaaaataaatacaccccggcaaaatcatcaagtacaaatatttttgctgaatcagcttgattagtaagcgctttcttttttcttttttaaaaatgactgtatcaacagccggcgcttgcgcttctgctgttttcattttttcccatcctcctttcacgggttcttgcattcactgtagcgcagaggtaaaagtccgtctacaatcatatgatcacatcctgttttatccctttataatcaaaggttcaggaggtccacctgaaaaaaagacaccgatattagaaaatgattattgacaatatctatcaatctttggattaattgtattaaggtgaagtggatgttatgaaatggggggttttatgaaaagaagccaatacaagttttactacaaactgattacgtttttctgcctgctcagcaccattccggttattttggtcggattgttttcgtacgagcactctcagaaaacggctatatccaacgtttcagaggaaaaattcgacacactccagcagacccagcaaagcatcgagcatatattgaaaaccgtcgatcactctttaacccactatgtgagttcgccgcctctccttcgcacattgtccgagcctttgcactcagaccaatttcaaatctataaccaagtgaaccaagagctcaattatctgcaaagctttgataccgatctgtccaacatgacgttagtcagttatacgaaaaaatggtacatgaacaattccggtttgtaccgtttgaatacagacactcttcatgaagcagcctcagcgtacacgaaacaaaaagcgagccgctcctattggacgcttgaggaaaacaatcatttgatttcaaccaaagaaggcacagcagaaaactgccgctacaatatcaatttaattaagcagcttcctttgaacagcacaaatacaaagggattggccgccgcaagcatcccgagctgttcgcttgtcaaaaatatgcccggctattcaaacgccaacaacctgtttatcatcgatgaaaaaggcctcatcatccttcataacaatatgtctgacgttggtgaatctcttcataacgacggctttgtccaaaaagtgctggcgcaaacggccaatagcggacagtttgaaacagttattgaccggattcattataaagtcacctatcaaaaatctgactataatgcatggacttatttttctctcgtttccctgcctgagttaaaaaaagaagccaaatcaatcggctggatcacttttgcagtatgcctcattttgttaacgctttcattgctgttctcttggcttggctcccgccatttttacaagccgatcagggtgctttacgaatcattcgcaaggcatggtgccatacaagaaaaacagccgcctcaaaatgaatttgagttaattgaacagagctttaagcagctgaaggacagaaatgatgatcttgaagaaacgatgaagcagcaagccacccacctgcagcaatattttatggtcaggcttatgctcggaaaactgacggatgaggaggttaataaccgttttgaaagcctcggtttaaagcaaaattggcggcaccttgccctgcttgtgctccaaattgacacactgaatcatacgccttatgagaaaaaagatatggatctgcttttgtttgccgtcaacagcctgattgagcgcaacatcccgacggacaaacatcttgcccccgccgtagttgacaaacagcaggcgacgattttgatcaatcaaagcgggacaaaggaagaattcatggctgagctgaatgagactgcaaggatgattcaggaaaaagcggaagctgagctgcagctgtctgtcagcatcggcatcagccagccgtttgatgtgctgacaaaagcgaaaacagcctatgcggaaggctcagaagcgttgaaatatcggctgaaagcggaaaacaagtcgatcatcttttacgaagaccttgaccagaaaaaaaccttcaaaacccattttccaaagcagcttcagcatgagctgttcgatgctgtcaaagcaggagacaaggagaaagcggataaatgcctgcacgcgattttacaagccattttcacccagaacaccaacccgtatcaatttcaaatcgccatcgcccgttttttgaaccatgtgattgagctgatgcatgtgcttgggatcgaattgtttgagcttgaagaaaacaaaatgctgtatgaccaaatttttgagctgaaaacgttcgaggataccgaaaactggctaaagaatgagtttattgatccgatgacagacaaagtgaacgcccgcgcggatgcccagtacaaaaatatttccgacaacatcattcatatcatccatcatgagtttgaatccgaattgacactggacgaaatcgcacgcaggctgcattacaacccaaattatttaagcagtattttcaaaaaagaaatgggaatttcattcagcgagtatgtctcaagctaccgacaccatatggcgaaaagctggcttgccgaaaccgacatggcggtcaaggacattgccgaaaagctgaaatataaaaactcgcaaaacttcatcagatcatttaagaagctggaagggattacaccgggaaactaccgccagcaaaaaagaagcatgtaaaaaacccaaaaccgcttgcgcgttttgggtttttccaatgttattttgcttgtttaaacgcttcttcgtattcctgaataatttgttttcctccgcttgactcccatttttccacttctttatcgaactggctttctgtgatgtctccaatcatatatttgtaggtcgcgtcatcaatgattttcttcagttcgtcaccccgttccgactccgatgcggaatacaggctttcagccgggtttgagacgataatcttttcattgtcctcggtcagctcctcgtacgccgtccgaagcggatctccagtgttttttaagtaggctttatcaatggcaattaaagcggacagcggctgaatatcagtctgccagtcttttacctggctttctttgcgtgtaaacgttttgtcctcacctttgttgtaatgaacgccgtcaatgccataagtcatcaggctatagacatcttcttcggcaattcggtcaaaaaacgccaagatccgtttaagctcagcttccgttttcacactcgttttcgggaaagcaaacacgccgttatggcctcctgatgcccatacccgctctttcccatctgggccttttatgcggttgatgatctcgagcttcatcgatttatcagaggcatggtcgcgcagattgaccgcatctaccatattgccaatataaattccggcttttccttgagaaaacagctcctgctgctgggttttgcttgtgacgggaaaatccttattcatatacccgttatcacgcagctttttcatatagttcatcgtgtctttgtattcctgtgtcatgaaatcaggcgtgaatttgccgcccgattccttccaatctgtcggcatgccttcatacgagccaatcgttttaaacgcgccgtaaatcaagtcattacggtctgccagcccgatcgtatcatctttcccatccttgtccgggtcgtcctccgtaaatgctttggccacttcataaagctcatccaacgttttcggggttttcaaatttaaattgtccagccagtccttccgaatgacgatcccctgtctggaaagcgggcgctctctgtatatcccgtagagctttccgtcaattgtcacatttttattaatgagtttgttcattttgtttaagttgggataatccttgatataatcgccgatttcccaaaacattcctgaccgaaaggcattcatgactgacgaatttttaatatcctggatggtcacgatttgcggaagattcccggctgcaagcgctgcattcagcctgtcttctttcaccgcgtctggaacccaggtgatgtcgagttctgtatttgtcagcttttcaatttctttaatcgccctgtccttcggcggctgctgatgatacaaaatcgccatccaagacagctttatctttgaatctgggccagctttgccttcagccgaagactgatcagttcctttacagcccgccagcactccgccgagtgccagtacaagcacaatcaaaagcaccctccatttgtttcccatcgtacccctccgtttcatatttctttatcctttgacagatcccagcaaagctccttttgcaaaatgcttttgtataaacggatagacaagcagaaccgggatggtcgccaccactatgaccgccattttaatggtttgctcaggcggcgggctgcccgaccccatttcagacatatccccctgcataccgcttgatacaatgacgatttggcgcagaagaacctgaattggccattttgctgaatcatttaagtacaagatcgctgtcatatacgtgttccaatacgtgaccgcataaaatagtgaaatcgttgcgatcgcaggaagagacagcggcagcacaattttaaagaatatgcccagatcattgcacccgtcaattttcgcggactcttccaggcttgatgggatattttgaaagaagtttttcagaatgatcaggttaaaggcattaatggctgtcggcaaaataagcgcccagtaagaatcgagcaatccaagcgatttgaccacaaggaaagtcggaatcatgccgccgctaaacagcatcgtaaatacgacgagaaacatgagcggctgccggccgattaaatcatggcgggataacccgtaagccatcagtgaagaaagaaacatgctgaccgcagtgcctatcactgtcacaaacacagaaacaagcaaactcttataaataatatctgttgaaaaaatgtagcgataagcatctagcgaaaaagtggtcggtattaaaataaattttttcgacacgacttcttctactgtggcgaaggatgctgcgatgacatgaatgaacggaagtacgcatattaaagcgaacatcagcaagaaaccataaatcaacatatcaaacagacggtttttcagtgaatgtgcgatagctcccacctctctttgtaagcgttatcatatttcggaaaccgagctcagcatgtgacgatatcgtgtctaaaatgtagcaaatctgtgattgccatgtctataatcatttgaacagtgtccccggccgggcgggggctgccgcgaattgagaccgataacaaaagaaaaagagcataatcttagaaaatgattatgctccgttctcctcctcgttcagaagttcagccgtattgatttgtggcgaaaacccaagttcattcacggcagattcaatggaccatggccggcccggattatcagagacggcgtaataagtgccgtaccggatattggtctcaatagcggctttgaaaatcgacagcagatcggggtgagaaagcagtgtctttttcgtccgttctttttcatgcagcgtatccatttcatctgtgacgactgttccgattcgcaggttgattactgatagcttattttccaaataaaacaaatggccgatctgttcagaggtcagctttaatacaccgtacaagttttttgacagcggataatcgcttgttgtgatttcccgtcctaagagcgagcgcccgtctttttcgtagacatctgtgacatgattactgctggcgaacacgagcttttgaatgccgagctccgctgccgcacggcacagataatagcttgccctatagaaaacatccgtcattttttcaaactcagcgatgtccataatatcgtatttgattttcacagcgagtaaattcaagatgacatccgtatcttttggaatcttcttcaacagctcctcataatttgccgcgtcagcctgaatggaagaggctttgccatcgaaatgatctttatcaagcacagtcacttcatagtctgaaataagcccttcagcaagcagtctcccaatcacaccatttccgccggcgatcagcacttttttcactatgttcactccccttttttatagattgcccattttcggcggggctgacacttttttggcactcacattcttaggcttattcaaaagtcaccggcagctcctcaagcgcccgaaatccaaaaagcggccgataccgccattcaaaatccgcgagattaaggctgggcattcgctgcagaagagtgttaatcgcaatttgcgcttctaatcgtgccagcgaggaccctaagcaaacatgatggccatgcccgaatgaaagatgcggattaggacttctcgtaatatcgaagacatcggggttcgtgaatatgctagggtctcgattagccgcccctaacaaaagatagacttgttctccttgacggatcgtcaccccgctgatgtcaatatcctctgacgcaactctggctgtcatttgcgtggggctttcatagcgtaaacattcctcgactgcggtatcaataagatctggattttctctcagtttcaaaagctgttctggatgctgcagcagacaaaggactgaattgctgatgagattgaccgttgtctcatgtccggcgatcgccagcaatatgcacgtagatgccgcttcctcttccgtcagcttatccttttctttccccttcaagagcatgctgatcatatcctgttgagggtggcgttttctcttttgaatcagctctttgaaatatgccatagcctgcacagccataatattgccctctgttaatgcctttcttgagcgggtaaaatcaatcgtttgaatgagactcgcagcccactcctttaattgctccctatcttcctccggtacacctataatgttagctatgacaaaacttgctaaaggaaaagcaaagtccgaaatgacctccatcttttttttaccttgcacttgatcaagcaaatgatggacagtttcaatgatatacggctgataactctctgtcgttctcggcgtaaacgctccgctggcaagcgtccgcaatcgtctatgatcaggccggttctgaaacagcatcatttgattttgcacatgtgaaaggtcctgatatttggttgagctctcaggcagcggggtgcggactttgaatctcgcatctttcaaaatagcagccgtttcttcatatcctgtgacataccagcccgggtattttaagaaactccctttatagataggatgaacagctcgcaatgtgtcgtaaaaagaatatgggtttttcaaaaactcagaagatgcagttgacgatgcaattgtcacgtgattttctcctttctgttcaaaaataaaagcaatcgacatcataccgattgcttttattgattctttcagcttttcgcacttaaactggccttcatttcttcgactgattcaacttcaaagcctaaatcactcagcattttatgatcctccgtctcctcttgcccggcagttgttaagtagtctccgacaaaaatggagtttgcggcgtaaagccctaatggctgcaatgagcggagattgacctctcttcctccggaaatgcgaatttcttttgatggattgataaaacggaacagcgccagcacttttaaacaatacagcgggtttaattcgttgacgccttctaacggcgtgccatcaattgcatgcaaaaaattcaccggaatggaatccgcgtcaagagccttcaagcttttggcgatgtcaatgacatcctgtttcgtctccttcatcccgataatggcgcctgaacacggagacagccccgattcttttgcgatttcaaccgtattgactctgtcatcgtatgtatgtgaggtcgtgatgtttgaatggtttctctgtgacgtattcaaattatgattatagcggtctactccggcatctttgagacgcttcgcctgctctggcttcaacagtccgagacacgcacaaaccttcagtccatacgtctctttaatttcctgaaccgcatctacgacctgatccacttctctgttagacggccctctgccgcttgccacgatacaatatgtgccgatattcagatcgtgcgcccgcttcgcgccttcaagcagcgtttccttattcaccatccggtaagactcaatcggcgctttcgaaatcgcagactgtgaacaatagccgcagttttccgggcagagcccggatttcgcattcataatcatattgagctttactttttttccataaaagtgttttctgatatgaaaagctccatgcattaatagcaaaatatcttcatcaggacaatgtaatattgaaagcgcctcttcgtcagtcacttctgctccagccagcacccggtctgcgagttccatccattgattcattctcatacccccacttgattcatcagtaatgatagattgatatggtcttttaccatatgtagaaccgtttctttcgtcacgttggcaagctttggcgtaacccctaaaatcggcacaccgcataagcgctcaatcatctcaggattggttttttcatcttcatcaggagagtcactgattccattgatgataattccggcaattggaagccccatgctttctgcatatttgacagttaaaaaggtatgattaatggttccaaggtgaggacgtgccacaataatcatgggaagctgcaacgcttttatgacatgactgaccaaatagtcctctcccaatggcacagaaataccgcctgcaccttctacgatgaagcattcatgtttttctctaatccgcccccaatggcttaaaacctcttccatggtgacagtctttccctcaagtttccctgcaacgtatggtgcaagcggcgctttgaaggcaaaaggcgtaatgtcttcatgagaaagactggtctgcgacatgtctttcagcaaacttgtatcactatctggatgatgacgcgatatcccgcttaaaaatggtttatacacaccgacatctctattatgttctttcaataaggcagcaagaccgctggatataaccgttttccccacttctgtatcagttcccgtcacaaaaaaacccctcaaatgatatgcagctcctttccgattgaatgaaatgttttcagcaaatcatcaatatcacccatactgtggtcagacgtgattgtaattcgaatacggctttcacccggtgcaacggtcggcggccgaatggcaggagcataaattcccttgccctgcagtttttcagcaaataggaccgttttatgggcatcgccaatgactacaggaataatcggtgtgtgatctcctttcaccacataacccatattcttcagactggttctgatcgtactgatataagaaaataaaagctgtcgtttttccctgctggcttcaatgatgttgaaagcctcatgagcagccgcacagctggctggcggaatagcggtttgaaagataaatgttctggcatggttcagcaaaaagtcgatgaagaccgctgatcctgccgcaaaacctccttccgcgccaacagctttgcttaaggtgccgatcacaatgtcgggacaaacaccaaagtattcactcgttcctcctcccgaatcgcccaaaactcctgttgcgtgggcatcatcaacgaccacgaaggcatgatagcgtttcgcaagtgagatgatctgatcaagaggggcgattgtgccatccatgctgaataccccgtctgttacgataaaacggcgctgataacgctgtgtttcattcagcttgttttcaagatcattcatatcaatatgccgataaacaactgtatcagccttagaaagtcggcagccgtcgataatacttgcatgattgagctcgtcacttaaaatgacatcttccttttctggcaaggatgaaaggagaccgacattggccaagtaaccgctcgaaaacagcagggccgcttctgtccgtttaaagctggcaatcttcttttctaacttttcatgccagaccgaattgcctgtcgttaaacgtgaaccgctgcttcctgtcccaaattgctgcaatgctgtttgggctgcatcgatcaaacgtctatcgcttgcgagccctaaataattgtttgaggaccagaccgtttgattttcgccatcaatgttccgctctggaaccggcgctccatccattgaccgcaggttacggtgtacgccggcttcctttactatgtctaaccgctcgtttaaccaggaatcaatcttcaaggctcgtaacctcgtggatcgcttgtttcataatggcaaccatttccgagagctcttcagctgtgctggcaagaggaggaagaaatgcaatcacgtccccaagcggccttgtcagcattcctaactctctcatttttaaggaaactttgtatccaatccgccgatcagccgggtaaggttctttggtttcctttgatcgtacaagctctgcaccgcacataaagccaagctgccgaatatccccaacataaggaagagcgtgcagatcttgaagaagaaaatggagctttttactttttttcgctacttgttccacaatgttttcagattcaaataatgccagattttcaagcgcaactgcacagccaagctgattgcctgtataggaatggccatggaaaaaggtttttaggttttcataatcatcatagaatgccttatagatgtcttcagtggcaaacgtaacggcaattggcaaatagcctcctgtaatgcctttaccggcagccatcagatcaggctggacattctcgtgctcgcacgcaaacatttttcctgtacggccaaagcctgtagcgacttcatcaacgatcattaagacatcgtatgttgtacatagctcgcgcacgcctgccaaatatccttccggcatcacgatcataccggaagccccttgtaccattgattcaatggaaagcgcggcaatttcctcgtgatgttccttaagcagctgttcaagctctcggaggcactgatcacggcactcatcaggatcaccgctttcagagcgatacacataaggaatcggggccttgtaactctcgaacatcaacgggccgtatacgtggtgaaaaagctcaattgaaccgacactgacggcgccaatcgtatcaccgtgatacccgtttttcattgcgataaatttttgtttctcgggcttcccgatgttcttccaatactgaaacgccatttttagggctatttccatcgcttctgcaccgctgtctgaataaaagacccgcgtgagcttttttgggctgatatcgattaatgtttcggcaagctgggttgctggaacgttggtcatgcccaataacgtggagtgcgcaatttttccgagctgtttttttatggcattatctagttcttttttgcggtgtccgtggacattaagccaaactgatgaaaaaccgtcatagtattccttgccatttatgtctttgactttgattccagtcccgctttcgatgattaaggggttttcatcataatctttcatttgggtaaatggcagccagaggtgctttttacttttttctatcaaatcatgagtcatgatcttcctcccactctattaaaataggctgcttctccagatcatgtatgtacgtgtttacatcattggatccatcaataaaaaagactcggcagccctcttcagtcccgtattctttcattgctgtaatacgctgatagcccattttcttacccgcaacatagcctgttatgtaatccggatcgtccgaccagcataattctgcaacggctgccgggtgccggcttacctttgaagcgagcgcaagggcctcttttattcttgaatgagccggcacgtgactgtgaagcgcccatttttcaaaattagcgtccggccaatccattctggagacccgcacccctttttcttttgtttgatccattcgctttcctgtatgaatatcaaacaacaccgcacccctgatatctgaccattcagggatttgttcatatgctttttcaatcacgtctcgtgaaacgccttctttttccaataacaatcgggccagcttttgcccttcttccgggcagctcacttcattcgtatgcacaggcaatggctgaatggtttttatcgattcatatacctcttcaaattgaatttgcataaaatcaggttttcctcttgaatgggataaccctttttctaataaagcattgactgtatgcttcatctcatggaaaggtataagccgttctccgccggatatatgctttccgccgtcttcatgagatccattcatagaagccctcattctgacactataaaaagtttcttcttgcatcatttctcgccctttcactgataactgaagaacgtgtagtgcttctcaccttaattgttaaccaattatattttaaggttaacaattagaatatattattctctcctgtttctgtcaatagaagaaagcatcgatttatggcagttggttaaaaggaaacaaaaagaccgttttcacataaaacggtctttttcgatttcttttaacagtcacagccacttttgcaaaaaccggacagcttcatgcctcataactgctgtttcgaaatgtcccgaagcagaacggaccactcggtagcaatcagaagctccctgtccagcatagacagctgtcaattctttttcgattttgtccacgccctcggccggcgttaaccgatcgtgtacaccaacaagactaaggtgcgggcgcggcgcgatcaggccttggatctccgatgcggaaaaatgctttgcaagcgatgggacgtaataataaaagccgtgcctgtcaagattctgtgttttgatcagcacgtgatgatccacctggctgcacaaatccacacacaccttaatccggtcatcgagcgccgctgtccaccacgccatcaaacctcccatagacatgccgatggttccgatcctgtcaggctgaacatcagagcgtaactgcatatagtccaacgcacttaaactgtcataaatcatcatcccccacatcacttttccggtgagaagcatttctttaaatatctcgctttccgcttttccccgccgatctccaaatccccaatgatcaatcgcaagaacgccgtatccgagtgaagtaagctcatcagaaaaagaaggcgttttcaaataatccgctccctcaatcagctcactttttcccctatcatactggcccccatgcgaatgctgaaacaatacggctgggcacggtccttctgttttcttcggcttcacaaaataagcgggcaccttttcatgtccatttaaatcgagcaggagcgtttcaacgatattttcttctctttcttcaatacgtaatgtctcaacactgattggcctccgatcaggcaaatcaccaagcaatcgaaacagttgctttcttctttcggctctcatcccatcacccttccttattcgcttacttcacatttacgagacagatctgggttcccctttatttttccaacataaatcacatcatttactaaatatttagtaaatattatgaaatatttcgaaaacaattattgtaaccgcttacttttatatgatagtatcaatttatcaaaaacagatgagttaatattttactaaatagatgagagggatacccatggttcgtattaaagatatcgccttgaaagctaaagtttccagcgcaactgtgtccagaattttaaatgaagatgagtcgctttctgttgcgggcgaaacgagacaaagagtcatcaacatcgctgaagagcttggttatcaaaccgttgccaaacgccgaaaagcccgcgggcaaaaacagcgggctcagccgctgatcggtgtgctgagctgtctgtcccctgatcaggaaaggcaggacccttatttttcttccattcggaaagggattgaaaaggaatgctttgaacaggaaattttcattacaaattcgattcatctcggctcctttcaggaacatatctttcgggaattggatggtgtcattgtcatcggccgtgttcatgatgaagcggttaagcatatcagcgggaggctggagcatgccgtatttatcaatcattcaccagatccgcaagcatacgattcgattggaatcgattttgaatcggcttcacgccaggcgattgatcaccttttcgacttaggctacaaacggttaggctacattggcggacaagaaaaagagcatacgctgaaggacggccaaagcattcgcagaacgattgaagataaacgcctgaccgcttttttggagtcagccgccccccagcctgagcatgtgctgatcggagaatacagcatgcgtgagggctatcgcctgatgaagaaagcaatcgatcaaggccatctgccggaagcattctttattgccagtgattctatggcgatcggcgcattaaaagcgctgcaggaagccggactgcaagtgccgcgggatactgcaatcgtcagctttaacggcattgaggaagctgaatttgccagcacgcctttaacaacggtgaaggtatacacagaggaaatgggccggacaggcgtaaaactgctgcttgaccgtctcaatggccgaacacttcctcaccatgtcaccctgcccacaacattaattgtaagacaaagctgcggatgtacagcaaaggaggtgacataagcaaagattcatcacgatgataaggaggaaaagatgaaacacacttttgttttatttctctcttttattctgcttgttctgcccgggtgttcagcagagaaaagctcagcagataccgcaaaaaagacgttaaccatttattctacaatgtcaaccgacagtgaaagagatacgttcagaaaactagcggcagcattcgaaaaggaaaacagtgacattcatgtcagccttcatttcccaggcaatgactatgaaaatatgatgcgtgtcagaatggcggccaatgatttgccagatctattcgatacacatggctgggggaaaatcaggtacggagaatatacagcggatctccgggatatgaaatggactcaagatcttgatccaaatttaaacagcatcctcaaaaataaaagcggaaaggtgtatgcctatccaatcaatcaggcaaaagacggtctggcgtataatcgcaatattttagaccgttacggcattgctccgccggaaaccatggatgactttatcaaagcactgagaacgattaaagaaaagagcaagggaagcattgttcccttctggtttgccggatatgacaaaagctcattcgcccaatattacgaccaattcgctacacctcttctcatcacagaccctgcccataatgaaaaaaaacagctcaccaatggcactttcaaatggaataaatttacttacttatcgaaaatcctcaaacaaatgcagaaagaaaaattgattaacatcgacgccgtcacggcaaaaaaatcacagctcattgaattaatggcccaaaacaaaatcgcctttacaatgcaaggcggcacactcggccaagacgttgcccagatcaatccgaacgtcaaggtcggcattatcccgacacctgccatccatcccggtgatgacccgatatggatcggcggtgaacgctacacccttgcagcatggaaagattcgcctcaattaaaagaggcaaaagattttatcgcatttatggcccgcccggccaatgccaaacaaatggctgaagccacatcgcttccttcagggctgaccaatgtgaaagctgatattttctacgcaaacgattatgagcattatcaagatgtcaaagtcgagccttacttcgaccgtttatacttgccaaacggaatgtgggatgtcctaggcacggttgggcaggagctcgcggctgacattttggcgcctcaagacatttcgcagaagctgggaagagaatataaacgactccgggagcaatcggaaatacagggagctgaaaacaatgagtgagatcgcaagggacgttcatgtgaaacaggttaagccaaaaaagcagtcctcactttggtggatgtacattcctgctttgctctccgttctggtctttatgatttatccgtttgtgaaaggcacattgattacctttacaaactggaacggcttttcacaagtttaccaatgggttggattcgcgcaatatgaaaggctgttttctgatcctgacacttggcatatcttaaaaaacacgctgctttacgggcttggcagcactttttttcaaaatgtggtcgggcttctatacgctctgctcttaaatcaaagcattaaaacgaaagcggtaacaagaacaattgtgtatttgccggtgatgatcagcccgctcattatgggctacatatggtactttttcttctcctatgacggaggcgcgctcaacgatttgctcggggtcttcggcatcagccctattaatgcgctcgccagtccctcgctcaatccatggatcattgtcatgattaacacctatcaatatgtcgggattgctatggttgtctacttagccggtctgcaaagcattccgaaagactactatgaagcggcgcgaatggatggcgcgaaacaaggccagcagttttttaccatcacgctgccgctgttaatgccctccattaccattaatatggtcatcaatattatcggaggcttaaagctgtttgacgtcatcattgcactcaccgcgggcggtcccggaaatgcgtcacaatccatgtccacgtttatgtatgatttgtatttcaaacggcaggatgccggctatgccgcaacgcaaggcatatttatggcatttgtcattttgatcatcagcttttgcgcgcttgcgtactttaaaagaaaggagacggaaatgtcatgagagccgtccgtacaaaaaacatgcggatcattacgcttcttgccgccattgtggcctgtgcgcattttattcctttttatatcctgctgaccacttcattgaaagcaaaaggagactacagttcgaaatggatatttccagccaacatctcctttcacaatttctcagaggcgtgggagcgcgcttcgctaggtaactcttttataaacaccatgatcatcacaggtttttctgccttgttattaattatattcggctcacttgccgcctacccgcttgcccggagggaaacgaaactgaataaagccgtttttgccttgctgatttccattatgatcatccctccgttaacgtccatggttcctttgtaccgaatggtcgtggacgccggaatggtcaatacacacgcaatcgccattttcatcaatacagcagcttacatgcctttaaccgtattcttatattcaggctttatccgatcgaccattccaaaagagcttgaagaagccgcaagaattgacggcgcaggcatgctgaaaatcttttttacgattgtgtttcctctgctgaagccgatcactgcgaccatctgtattatttcttgtgtctttatttggaacgactatcaatttgccattttctttttacaagatcaaaaggttcagacattaacagtcgccatggcaagtttttttggagaaaacgcaaacaacctgcatttagttgccgcagcggcacttatggcaatgctgccgatggttgttctgtttttggcgctgcaaaaatactttattgccggcctgtcttccggagcggtaaagggttaacattaaagggggaagcaatatgaaaaagattacatttatcggtgcagggagcacgattttcgccaaaaatgttttgggagactgcctgttaacagaggcactgaatggatttgagttcgctctttacgacattgatcccaaacgcctgcaggaatcccagctcatgctcgaaaatctaagagaccgttataacccaagtgtggccatcaacagctatgatgacagaaaactcgccttgcaaaacgcaggctatgtcatcaatgcgattcaggttggaggatacaaaccgagcacagtcatcgatttcgagattcctaaacggtatgggttgcgccagacgatcgccgatacagtcggcatcggcgggatattcagatctctcagaacaatcccggtcttatttgatatcgcaaaagatatggaggaaatgtgccctgacgcatggttcttaaactatacaaatccaatggccactcttacaggcgccatgctccgctataccaatatcaaaacaatcgggctctgccacagtgttcaagtgtgcacgaaggatttatttaaagctctcggaatggagcatgacggaattgaggaacgcatcgcaggcattaatcatatggcttggcttttggaagtcaaaaaagacggcacagatttatatccagaaatcaaaaggagagcgaaagaaaaacaaaaaacaaagcatcatgatatggtgcggtttgaattaatggataagttcggctattatgtcacggaatcgtccgaacataacgcagagtatcacccatactttattaaacggaattaccctgaactgatcagcgagctgcaaatcccgctcgacgaatatccgagaaggtgcgtcaagcagattgaaaattgggagaaaatgcgggatgatatcgtcaataataaaaaccttacgcacgaacgctcaaaggaatatggttcaagaattatagaagcaatggaaacaaacgaaccattcaccttcggaggaaacgtcttgaatacagggctgatcaccaaccttccttcaaaagcggttgtggaagtgacatgcgtcgccgacagaaaaaaaattacaccgtgcttcgccggagaactgcctgagcagcttgccgccttaaaccggacgaatattaatacacagctgatgacaatcgaagcggctgtcacacggaaaaaagaagcggtttaccaagctgcaatgcttgatccgcatacaagcgcggagctttccatgaaggacatcatctccatgtgtgacgatttatttgcagcacacggcgattggcttccggcatacaaataaaaactaggggaccgctctcccctagttttttggttttgtttcgccttcccaggccatcatgccgccttcaacattgactgttttaaagccttgctcatccaggtacttgcagacgttcatgctgcgcattcctgagcggcagataaatacgtactctttgtctttatcaagggtttccattttttcaggaatatcccctatgcgaatatgaacggcttgcgggatcatgccttccgctacctcttcatcttctctgacatcaattaaatataattcttcgtccgcctcaattttttctttcaaagcggctgtgctgatttcttttatttccaaagaaaacactcctattcacagtgatcatgttcagtatatcaaagtcagctgaacgattgctattctgagactgatgaaaaaaatccccttttggcaaaggggattttttctaggcttagtttgccacaatattgacaagcttgccaggcaccgcgatgattttccgaatcgttttgccttcaagctgctctttgaccttttcatctgcttgagcaagctgttccagctgttctttcgttgcatcggcaggaacctgtaatttcgcttttacttttccgttcagctgaataacgatttcaacttcatcatccacaagttttgtttcatcatatacaggccaagcttcgtaggcaattgtgccggaatggccaagcttctcccaaagctcttccgctaagtgtggcgcgacaggagaaagaagcttcacgaagccttccatatattctttcggcagttctgttgctttataagcttcattaataaagaccatcagctgggaaatacccgtgttgaaacgaaggccttcataatggtctgtgactttcataaccgtttcatgatagacgcgctccaatgtttcacccgcgccttcaacgattttgtcattaagctcaccgctgtcttcaataaataggcgccatacacggtcaaggaaacggcgcgcaccgtctaatcctgattcagaccaggcgattgaagcatcaagaggtcccatgaacatttcgtacaatctcagcgtatcagcaccgtgagaggccacgatttcgtcaggattgacaacgttccctttagatttactcattttttcgttgttttcgccgagaatcattccttggttgtacagcttttggaacggttctttcgtcggcactacgccgatatcataaaggaacttatgccagaagcgggcatacagaaggtgaagcacggcatgttctgcaccgccgatatacatatcgaccggaagccatttttccaatttttctggtgatgccagctgatccggattgtgcggatcaatatagcgcaagaaataccagcagcttcccgcccattgcggcattgtattcgtttctcttcttccttttttccctgtctcagggtctgtgacttccacccactctttaatgttcgcaagcggtgattcgcccgttccgctcggtttgatttcatccgttttcggcaaaatcagcggcagctcctcttcagggacagctgttgacgttccgtcttcccaatgaatgaccggaatcggctcgccccaataacgctggcggctgaagagccagtcacgaagacggtatgtcactttcttctcaccgtttttcgtttcttccagccaagcgatcactttttcaatcgcttcctgtttgtgaaggccgttcaggaaatcagagttcacgtgctcgccgtcgccagtataggctgcttcctcaacgttccccccttttacgacttccttcaccggaaggccgaatgttttggcgaattcaaaatcacgctcatcgtgtccaggaactgccatgacagcacctgttccgtatgatgcaagaacataatccgcaatccaaatcggcagtttttctccgtttacaggattgatcgcatacgctcctgtaaatacgcctgtctttgttttcgcaagatctgtgcgttctaggtcactctttgattgaatttctttgatataagcttcaacagcttctttttgctctgccgttgtgatgttttccaccaatgcgtgttccggggcaaggacagtgtatgtagcgccaaacagcgtatctggtcttgttgtaaacaccgtaaaggaatcatcatgtccatctatagcaaaatgaacgtgagcgccttccgaacggccgatccagttgcgctgcatatctttaatgctttccggccaatcaagctcttccaagtcctcaaggagcctgtccgcataagcggtgattttcagcatccactgcttcattgggcgtctctctaccggatggccgccgcgttcgctcttgccgtcaatgacttcttcgttggcaagaacagtaccgagcgcagggcaccagtttacaggcacttcgtcaacgtaagcaaggcctttttcgtatagctttaagaaaatccattgcgtccatttatagtattcagggtcagtcgtattgatttcgcgatcccagtcatatgagaagccaagcgcttgaatttggcggcggaagttatcaatattctgcttcgtaaacacagcggggtcgttccctgtgtcaagcgcgtattgttcagctggcaggccgaatgcgtcccagcccattggatgaaggacatcatagccctgcatgcgcttcatgcgggacagaatatccgtagctgtgtatccttcaggatggccgacgtgcaacccagctccagacgggtaaggaaacatgtccagcgcgtagaatttttgtttttcattattatcaagagtggcaaatgttttgttttcaagccaatatgtttgccatttcttttctatctctttgtgctgaaaactcaaagtaaaaacctccttctgattgaatacggcgtgtatggttcaagtattgacgggaaggagaggattattcagaatattcccaaactaaaaaaaactccctcatccctaaaagggacgagagactttcgttttcccgcggtaccaccctcgttagcgcggcatacgccgcactcacttgatacttttaacgcagttatgcgtcagcggcttttcaccgctgcaactctgaggtgagttcggaaacaaacttgattgactttcaccagccgtcaactctctgcaacaatatctgtttcttactgctcctcttcattgttcttatcgcaaccgtaatctaactgtattttatagaattctgttcataagtgcaagcaggtttgtatacaatgggaatgtaccctgaacgggcggagattgaggacaattattcgggtggagttttggtttgacgtttggactcggccggttcgccgccgctgttcagttctctcacaaagtcaaaacttctgagaacagcttcaccgccgtagcctgagataatggataagatgacaagttgaattcctgaatcggggtcagcggataatacaagtaaaatggaagccgtcatgccgataaaccaatcttccaaaaatccaaggtagataaaccgcttcgtcattctgggcttctccagcctgcctctctttttcacatgaccgagaatccccatgattcctccaattacacaagcaatgagtacctgatgcagcatcttcatcatcaccttcctaaagcccttatttcgtaaagcgacttcaggccatccagcccccttaaacgattccgatgattttcgatatctacataccggcaaatctgtaaaaagcttgtttcttccattatatgtgaacacatgatcggtaagcttgatgcattggattcatttttcacccagtgacattgacctagtcacctatttagcatgtaaaaaacctttccgttcatatgttcaaattctgttcttatttttagtgtatacgaggacaagccctaatgacaaacaacaaactgcacttgcttgaatcagaacatgtgttgtgctacggttactgtagaattcattttaaaaaggggaatatcaggctttcgcatagcaagctgacggcctaagggggatttatatggctagttttcaatcatttgggataccaggacagctggaagtcatcaaaaaagcgcttgatcacgtgcgagtcggtgtggtaattacagatcccgcacttgaagataatcctattatctacgtaaatcaaggctttgttcaaatgaccggctacgagaccgaggaaattttaggaaagaactgccgcttcttacaggggaaacacacagatcctgcagaagtggacaacatcagaaccgctttacaaaataaagaaccggtcaccgttcagattcaaaactacaaaaaagacggaacgatgttctggaatgaattaaatattgatccaatggaaatagaggataaaacgtattttgtcggaattcagaaagacatcaccaagcaaaaagagtatgaaaagcttctcgaggattccctcacggaaattactgcactttcaactcctattgtcccgattcgcaatggcatttcggctcttccgctagtcggaaacctgacagaggagcgatttaattccatcgtttgcacattgacgaatatcttatcaacatccaaagatgattatttgatcattgatttatccggattggcccaagtgaacgaacaaacggccgaccaaattttcaagctgagccatttgctgaaattgaccggaactgagttaatcattaccggcattaagcctgaattggccatgaaaatgaataaactggatgccaatttttcgtcgctgaaaacatattcaaatgtaaaggatgccgttaaagtgcttccgattatgtaaaaagatcccgctcacccagcgggatctttcagattgttgacaaaatcctaaaatggttttcattttaggattttgtcatcttttcagcgtgattgaaaacccttgaagtctaggaaggacgagcataggagcggagcgaatgttctaattcgtgagcaccgaagcgcaggcctgacaacgaatgcgagggtttgtcgacacgctgaaagatcccgctcatccggcgggatcttttattatgaagagattgatgcctgcttatttgtttctttagctgattttatccgtttgtcatatagaagcgttgtggcaatactgatcagcagcaataccaacagagataaaacaagagccctaatgccgtaatgatcgacaagcactcctccgaacaggggaccaatcattctgccgcctgtcgccgcactgttgacaaagccttgataaaagccttctttccctttaggggcaagctgattggcaatagtcggcacagcaggccaaacaagcatttctccaatagtcaggatcaccatcgcagcgagaaacatcggaaattgctttgcagtcagcagcatgctgaaagacacaataaaaatgataaagccgatgaccatttgcgcttttagcgactcggcccattttttcaccacaaaactgacgagcggctggccgagcacaatgagaattccgttaaccgtccacagcacgctgtataaggaaagagatattccaatgctttgtgtgtacgaagcaattgtggttgaccactgagaataagccagccatccgagtacatagcctccgcttaaaatgatcagtgcggcaaattttgctttgctgttcacagcatcgtaatcaagcacagacgtttgggacgcatctcccgtctgaatatttcgaaatccgaaatatacaataaagaaaaagaccagatacagcgcggcattcgccaaaaatacatatgaaaacgagaaagacgccacgacaccgccaagcgctgaaccgacagccacacctgcgttttgcgcgacatatatcgcattaaatgccttccttcccccttcaggccataccgatcctgccattgcgtagctggccggaaaaacaacaccggagccaaagcccacaatcgtcagcagcacaatataggctggccaatcatgaaaaaagacaaggcccatcaggcttgctaacgtaatggctatcccaagcataatcgatttaaaaccgccgattttatcaaacaaaaaacctccgcataaattgccagccacactggcgccggaattcagcatcaggacaagtccggctactgttaacgactttcctaaatgattatggatataaatcgtattcagcggccataaaaaagaagcacccgtcacattgataaacattccaatgactaaaattttaagagcacgcggcatactcatccccctttcttacctaaaaaagctcatgaaaaaaacgaaacctaaaacggctccgtacgaatccagttatcatagcacattcattctatctgtctctctcacatttttcaactgatgagcgtgaaaaaatctaacaaatattgtttgaaaaatgtaaaataaatagaaaaagggggcatattatggaaatggcattagcattcttaggttttctggcatgtctcattgcactgggctatggattatatcactttgtcagatatgtactgaaaaaggaaaaacgtttctccaagagacttttttggccgcttttcattggaggccttgtgctgctctttaccggagcagcattggcagaacctgacacttccgcagcaaatgccgagaaaaaatattcagcgctaaacgccgaatacaaaaacctcacaaaagagcatgaagaacttgagaaagaatataaatctgtcagctctgaagcaaaaaaattaaaagacaacaaagaagatcaagacaagcttgagaagcttaaaaacgaaaatagcgatctaaaaaagactcagaaatcattaaaagctgagattaaagagcttcaagaaaatcaaaagcagctcaaagaagatgcaaaaacgacaaaggctgaaaatgaaacactccgacaagataaaacaaagcttgaaaatcaattaaaagagacggaaagccaaaccgccagttctcatgaagacactggaagttcttcaaacaatacgagtaaaagtgatgaaaccaaaacagctgacaaagcagaaggctgtaatatcaaaggaagcaaaaacggcatctaccacacgccaggcagtacatactatgaccggacaaccgatccggctgaaatgttttgctcagttgaagaagctgaagccgccggttatcgggcgccaaaacgataaacaaaaagctccagtatgtctggagctttttctgtttcacaacgacgatttaatgaccttcttataataaagaactgacagaaaaccaaaaatggagtagagcgcagtatataacaccatcaccataatcatgggcgcccatatctctgatccgaataagaaccagccggattggacggcaaagtaactgtggaagagcccgacaacgagcggaatgccgaagttatacatttgtttgatgcgtattccctttattaggtcgccctgcgtaaagccgagttttcttaaaatcgtatagctcggtttttcatcttcactttcacccatttgtttaaaataaaggatacaacctgatgtaatcaggaacgttaaccctaaaaagccgacgatgaacatcaccataccaaacagtgatttttgcgcagcgcttgtatccaatcttgataaatgctcgtttttcttgttcacctgttgaaaaagctcatttgctttttccatttgatcttcatgtttcacattgacgccgataaatgtagattgcgccagctgaattcgggggtctttatccttgttcagctgtttaaacaggctgtcatccacaatgacagcgggcatgcccccgcttgtaaacgtgtaggatacaagaaactcttctcttaatcctttatattttaatggctgcgtctcatgtttgctttttactttaataacaccagagtccttgaaaaccattattttttgcagcaagtcggtgtatcctgagaaaacggcttctccagccgccacatcgactccttttacatctttgtcgctaacaacagcaagctgcatattgctgggatcgccctgcatctctttcggagttccatccataatatttgcaatgtcaacatttgcttgcaggacaggtgttgccttttttacaaacgagatgttgctttccctcaatttgttttcaaataacttggcatctttctcattcatgaatgaaaaatcagccgctacattttgttcagcggtcttttccgacgagtaatacgagatgtaagcaagagataacagcccgatggcgagcgctgaaacggttgtaataatcgtcagcagcagcgcattcgatttcattctgaacatgatcgatgacagtgacagaacctcagaaatatttaagtagccgcccttgctttttcgaatgatattcgagataaacgtaactgatcctttataaaacaaaaacgtcccgataatgacgctccccagaatgaagctcatcgcaacaaacagttcattaatggtcttaaattttccgccaaacagctcagaagacacatagtatcctgtcaaaatcaacacgatgcctaaagcgccgatcagcatttggaaaaatgatattttcttcactttgtcttcagtggaggacgttactttaaacaaagataaaatactctgttttttgataaacgtataattcatgatcatgatcaaaaggtaaatgccgcagaacacaatgaccgtttggaccaaggcctgctcagaaaaatgcagtttcgcatccgctttgacatcgacaattttgaacagaatcatcaagacaagcttcgatatcgaaaacccggccgctaccccgatcgctaatgaaccgaaatacagcatgacattttctgcacttaagatgcgaaaaattttatgcttcgtcattccaattaattgaaacagcccgatttctttactccgtctcttaataaaaatcgtattggcatataaaatgaagatcgccactacagccacaagcaaaatcgaagcggttttaatagccgcggctcccttgattgaagccttcacttcgttaattgctggatcatactgcagcgtgacaaaggcgaaataaagcgccacgctaaagatgagcgcaaacacatacaaatagtaattccggagattctttttcaaatttcgcaggatgagctgattaatgttcatgctgcaccccgcctaacacgccttgcgttttcataatatcctggaaaaacgtttgcctgtcctggccccctttattcagctgtgtatacatttgcccgtccttaataaaaatgactctgccgcagtagctggcagcgacgggatcatgggtaaccataataatcgtcgcgttgcgtttttgattgagctggctcagcttatttaatagatcggaggccgatttcgaatcgagcgcgccggtcggttcatcagcgaaaataatgctcgggtcatgaataaacgctcttccagcggatgttctctgcttctggccgccggaaatttcattcgggtatttatcccgcaattcatatattcccagttcctttgcaacttcctcaaacttgcgattggcttccttttttgatagtttcgtgatcgataaaggcagaaggatattctctttcactgtcaatgtgtctaacaaattgtaatcctgaaagataaagcccaaatgctgttttctaaattcagccagctgcttttccttcatagccgtcatgtcatttccattaatatgaatggttccgtgactgacctgatcgattgaggacagaacgttgagcaaagtggtttttcccgacccggaagcacccataatactgacgaattcgcccttttcaatgtgaatatcgatgcccttcagcacttcctgtttattcagcttgtttccataactttttcgaattttattcgcttctaaaatcaccatttacgcagtctcctttatattggataatctcattataaaaaggaatgccgggcttttccttcgatacggcgaacaaaaaagaaaagcatgtgacattttcgtcacacgcttatgacatgttcaaattgattccgtattggaaaggttaatgtaaaaactgttcccgcaccaaactccgactcaacatcaatatggatcaataacggcgccgctgctttttttgccaagtacagccccatgccagttgacgcttgatcatggtgatccgttgtggatgtaaaccctttatcaaaaatacgcggtacatcttttggatcaatgcccctgccacagtccttcacttggagctgcgtctgttcccctttttgaaaacttttgatctcgatttcagaggcttcgctgtatttcaccgcgtttgtcagcagctgcctgatgataaacgccagccattttgcatcgctcagcacttctttggcctcgagctgtatgtcaaaaccgatccctttttggatacaccacgattgcaaatctttgatttctttaaagatcaaaggctgaagctgaatgaattctacagacagatcgttttcaataaatgatatccgtttttgatgaagctgctgatcaagaagcagatgaatacgcagccattcatatgacagctgggatttcagtgctttttcttccattctatcaatgattaaatgcatcgctgttaatggagttttgacctcatggatccatgccatcagctcatctttttcattttccaatgctaagcgatgccgtgctgcggtctgcttcaagtgttctgtttgcccggcaatgcttctttcaaccattgcttcaaacggcgtttccggttcatttatggctgtcacatcgagattgttctcccatgttttcaagcttttataaaacgctgtttctttccgatagcggaaccaaaggaatatgataaaaaacaaaatgcacaaatacaccatataaagtacattcccaaatgatatggaaggatcgacaaaaacaatgaacagcatcaaagcctgctgaaacaaaaaagcggcaatccagctccgcctttcgataaggaatgctttaatcatagaacttgtcctcttccttcgcgatgtagccctggcccacctttgtctcgatatatgcaccaagctgcagggcgtccagtttttttcgcaggcgattgacattgacggtcagcgtattatcactaacaaaacgctcatcgttccacaagcttctgatcagctcttcccggctgacgatcttgtttttttgctctattaattgttttagaatgaacatttcatttttggtcagttcaacagatcctttgtcattgctgacgaggttctgctccgcgtctacagcagcgccgcaccacgttttaatcgtattcggctccgtattataatggtgcacacgccggaacatcgcttggattttcgcaatcagcacatcaaaatgaaatggcttttggataaagtcatctgccccgagctgcatggacatcaccatatcagcaggatgatcccgggaggataaaaagagaatcggaacatttgaccgggagcggatcagccggcaccaatgaaagccgtcaaatttaggcagctgtacatcaataatgacacaatcaggattaaccgccgcaaattcctgcagcacctgactgaaatcctgaatgccgtatacatcataggaccatcccgttaaacgatccttgatttcatgaaacagcgattcatcatcttcaatcagcaaaagtttaaacaatcaactcaccgcactttttccttttttatcaagtgtatagcaaaacgctatcatgcgctatagaaaaagccggctgtctcagccggctcgttcgcattatagttctcttctcaacgctgtcagcacgttggtttttgttgcttttctcgccgggttcattccggaaatgactgcgacccctccgcaaatcacaacggcaatgatcacaagactcgccgggatgtaggagaatgtgtaattcaagtcgcccgcatcgcttccgcttgtggccgcaagaatcatcggaacggccaggttgacaaggtagctcacgccgtaagaaatgataatcccaatcacacagcctaaaattccgatatacgcgctttccatcaagaacattcggcgaatgattgacgggctcgccccaatcgctttcataatgccgatctcttgcgttctctctgtcaccgccatcgtcatcgtgttaaaaatgccgatcgctgaaatgataactgcgatacatccgacaaagatcagtccgattttgaagaccatgaagaaggtattggctccctcaagttcagtagtcactgatgtgacatagtacccgtcatctgttagatcatttgtcagctgttccacattctcaaacttatcagcaaaaacaccaatgttcgtttcaacatttccgcctttgaaatctaagaattccgaaaaatcttttttgaattgatcactgataaaaatgtttgagtcctccatccagtcttgagatggtttttttgtaataccgacaattttaaagtcatatgtttttgtttttgtaacatcccctgttttaggatctgtcttcgatacacttagttctattgttttgttcagaatatctttcgtatagccctttggttcttttatatcttctggatttccttttgcttcttcgatttttttgttatattcttccgattcttttttcgtcaataatctctttgcgaagtcgtatcctactacgatttcattttccgactttgcgactcttcccttttccaattccatattggcctttaattcatcattcatattagtaaaaatgagatttgagctttcatttgtacgattgcctaaagtagctttgtttggttcatacacttgcgttctttctacaactgaccttacgtgatcatacttctctaaatcagcttttttaataggcttgtctccttccttgcccattacactgactttcgttacaatctgctggctcattgtcatatctgtaattgtcttttgaatcccaaatccaacggacgacaacacaaccaaaaacgcacacgccattgttgtcgccagaatcgtcataaagacgcgaagcctgtttttcttcatatttcttctgataaaatgaacctgatccttaaacctcaacggtaattcctccttttagcacaccatcatgaagctgaaattttgaatgtccgatagaagcgacttcatcatcgtgagtaatgatcacaaatgtaatgccacgctcacgattcagctgctggatcaattccagcacttcatgttccgtttctgaatcaaggcttcccgtcggctcatccgctaagataatcgaaggatttaaaatcaatgctcgagcaatactgacacgctgctgctggccgcctgacagttcattcggataatgagcggcgtggttttccagaccgacgcgtttcagcatgtcctgcaccttttgcttccgctcagatggcttgattccttttaacgccagcggcatttccacattctcatacgtcgttaaacccgggatgagctgaaagctctgaaaaataaacccgaaatggtcaagccgaaattgcgcccattccttttcattaaaccccgtaacatcagtgccattaatgacaatccgcccttttgtcggcgatatgtagccggaaattaaattcaaaagcgttgatttccctgagccgcttcgtccgacaatgcaggcgatttcccctttcgccacgctcaatgaaacatccttcaatactggaacttcattctcacggcccttttttccgatcgtgaaagaatggtcgatatgctgaacatcaatcatatgttctctctcccttacaaaagtttcattttttataaatcgcaaaataactaatcaagaaaccgattaccgcacctgtacccatgccaatgagataaccggcaaagctctcgcttgcagtaaatccaaaatagccgaagcccatgattcctatgataataacgatgatctgcaccgggcggttaagcggcttccataagaagaaatatccgtttctttcattagacattttaacaaagctaatatagccgatgatgtaaaaaatgatagtcatgatagccggaatgactaaataatatggtgaattctcagcccatttcgagtctacataaattatcggaatgaaatactgcacccatttaggtactggaccatggataaaatctattgatccgccaaaaaggatctcgaggttgatcgcaggcaggctgatgagcaaaaatggcgaaatggccacggtaaatgagactagaagctgtgcgaaactattgcctgtcaaagctccacccgccataacaagcgaataagccagcatgctgacaatgatcattccaaggctgtaattgtgaaaataaacggcctgatcaggcttcaaaagtatgatcagcaaaacagataaaacataacctatgagctgcggtatcacaatcaccattccgccagtaaggaacttcgcatgaaatatctgccctcttgtatacggaaggcttaatgtaaaatcaaaaaagcccttgcttcgttcaatccctagctggctgaccgccaaaacgactccccaaatccaaaacaatgagataaatgagctgtttaaataatcaacgctgaatacgcaggggccgacccaattttcttttccagtgacacagccttgatagatgagatacatatttaaaattgataatggattacccaatataaaaaccaaaatggtgataactaaggcgactttattctgccgccactctttgtaaagcagtccggaatccggcaactcacttccctccaaacctatggcatttcttacacttttgttttcttataaatagagaagtagctcacaaagaatccagccactgccccaatgatcatacccaaaatataaccaataatggaatgtccggtatagtatccaaataaaccaaatccaaggatgccgaaagccataaccagaatttgcaccggacggtctaatctgttccataagaaaaagtgtccgtttcgttcacttggaagcttcttgaagcttataaagccaatcaagtaaaatagcatgctcattacggctggaatcaataaaagatatttactgttaatcagccattcatttacaacgtaactaatcggtactaggttcgataaattgcttgccagagagaaataactctcaggggaagggaatatttcccatatattcgcaccaaaaacaacttctaggtttccaaccggcaatgcaataattaaatacggcaatatagctgctgaaaacgccgttaacagttgggcaaaagcatttccagttaacgctccggcggccatcaccagtgaaaaagccataaaacttatcacgattactccaatgctgctgtgctcaaaaaagtagacgtgttcagggttatagacaagaatcagcagccatgcaagtaaaaagccaatcaattgtgacagcacaatcacaaaaccgcctaaccaaaattttgtctgaaaaatttggcttctgttatacgggaggcttaatataaaatccatcgtgcctttcgaacgctccattccgaggaagcagaccgccaaaatgacacccggcacccagttgatatctatcagattgcttatggaataattcacaataaaatcacaatattgcgggtcttggcgatcaagacacccttgataagacaaatacgtattaacgatagaaagcggatttgccaatactaaaaacgcgatacttaacaaaatcaccacttgattctgcttccactctcgatagaggagacctcggtctaccatctccgcttccctccaaacttcgcaatgaacacttcttccaggttgacaggaagctcattccacacttttggcttcagctctctcaaaaagctctttttctcctcatcgcttttcggaatcagcactgtgtaaaacacgccggcctgatcgagcatcggaatgttttgctctctgatggccaaattgacatctgtatcgaaggccatttgaattttaatgtattcttcttttaactcatcaagatccatgacgttggtcaggctgttatcttcaagaaaaccaattcggttgcacatccgctctatgtcttcaagccggtgggacgtaatcaggatgctcgtatcacgctctgccacttcatcgaccatcagctgcagcacatcatgccttgtcaccgcatcaataccatccgtcggctcatcaaggaggatcagcgccggtctcgccgcaaacgacagaacgagcgatagctgcttttttaagcctgtcgacagctcacggtattttttcgtttccggaatttcgtatctgttcatcagctcattcgcgtacgtgacatcaaatttcggatatattcttctcaaaatatcgactaactgcttgtatgtatacttatcgtaaaacggattttgaacaggcatgtagatgatattttgtttgactttcgggtgctttttgatttctacgccgtcaaataaaatcgttccgctgtcagcgaaaatgatttgctggattaagcgaagcatcgtcgttttgcccgatccattgcgtccaagcaatccaaagatttctcctttttcgattgttaatgaaacatcttttaatacttgattgccgtcaatcgcttttgacagctgccgcagttcaatcattttttttgcctcccttcacatcagcgctgatttcctttatccattcgtgcagtttttccagctcaacccctgcatagtgtgcatcgatgatgagctgtttgagttgctctttaatcatcgtcatcttcccttcaaccagtgtcgtttttgcattctccgatatataggtccctctgccccgcagcgtttcaataatcccctctcgctcaagttctttatacgctttgctgacagtgttcggattcgcaataatgatcgttgccaattctctgacagaaggaagcttatcaccaggcttcatgatccctttcaaacaaagctctttcatttgctgaataatttgttcgtaaatgggtgttgagcttcttggatcgatttgaatcatttacttccctactttctatacgatctgaaccttttatagataaaaatgatcaattatacttttttgccattcaaaaccgatcatcacaagaacaagaaaaaaagaacaagcgatcacagatgccgcaatcagcattggcacgttacgtttgtttcgttttttatgtttcataactgcctcccttaatgtcaatatataaatgattttatattagtgtctatagtgtattacttcaattagtacacttaatacaataaatactttgactcacaaagtcaatcctttttttacaaaaaaacggacccttttaaaagggtccgttttcctacacatcaagagggtgctgcaggatcatattattttgcaaagattgaagctgaagtctcattctgtacagctgttctctctgctgatcatttgacgacagccatagtttattcaaggcatttaccgcatcttctagctgcatttgtgcatcactatattcttgatcgttataatgctcttgtttagaagcgattttcagctgttcttcagcataatcataggcctgcatacattgctggagatgttcatctactgattgtcttgttgccacagtaacccctcctcttggtaatggaaatcatccatcattcatattgtagcctcatctgactttattcaataaagtaatttatggtcgatattcatttgttctcttgtgaaatgcgtgctacaattttaggatgcaatcgtacgcaaggaggcacatgaattgtgatacagaacaatccttttccttattcaaatacggaaaaacgctatcatacattgaattatcatctcagagatcatttcggccataaggtgtttaaagtggcgcttgacggcggctttgactgcccaaatcgggatggcaccgttgcccacggaggctgtacgttttgcagcgcagcaggctccggcgattttgccgggaaccgggccgatgatttaattacgcaattccacgacatcaaaaaccgcatgcacgaaaaatggaaggacggcaaatacatcgcttattttcaggctttcacaaacactcacgccccggttggggtgcttcgcgaaaaattcgaatcagtgctagcgcttgatgatgtggttggcatttcgatcgccactcgcccggactgtctgcctgatgatgtcgttgattacctggcagagctgaatgaacgcacctatttgtgggtggagcttgggcttcaaacagttcatgaacggactgcacttctgatcaaccgcgcacatgattttaactgctatgtggaaggcgtcaataaattaagaaaacacggcatacgtgtctgctcgcatattatcaatgggctgcctttggaagaccgggacatgatgatggaaacggcaaaggccgtcgcagatttggatgtccagggcattaaaatccatctgcttcacctactgaaaggcacgccaatggtcaagcaatatgaaaaggggaagctggaatttctttctcaagatgattatgtgcagctcgtctgcgatcagcttgagatcattccgcctgaaatgatcgtccaccgcattacaggtgacggaccgattgagttgatgatcgggccaatgtggagcgtcaacaaatgggaagtgcttggcgccattaataaagagctagaaaatcgaggcagctatcaaggaaagttctttcagcggcttgaggaggaatcagcgctatgattttgaagaaaattcttccctacagcaaagaactgctgaaaatggccgcgggagaaggagatattgtcgtagatgcgacaatgggcaacggacatgatacacagtttttagcggagcttgttggtgaaaacggtcatgtgtacgcattcgacatccaagaatcagccgtggccaatacaaaggaacggctcggtgacatgtatcaagcgcgaacaacgttatttcacaaaagccatgataaaatcgctgaatccctcccgcctgaaacacatggcaaagtggcggccgcggtatttaacctcggctatttgccgggcggggacaagtcaattacgacaaacggcagttctacgatcaaagcaattgaacagcttctcggcatcatgaaagacgaaggtctgattgttctcgtcgtctatcatggccacccggaaggcaaagctgaaaaaaacgacgtgctcgagttttgccgggacttggaccagcaaacagcccgtgtattatcatacggatttatcaatcagcaaaatgacccgccatttattatcgccatcgaaaaaaaagctcagatcagcaaatgatttgagcttttttctttgagtttttcatccagaacattttttgaaatttccggtaggctctgccgttgatataaaagaaaagggaggtttttccgctggctttgatcagcttctttgcgagccggcccatttccttttggcccgccactttatcatctgacaaataaacgccaagcaagccgcgattgattaaacgatggaagttttcatgcggaatgccttgtaaatgctcgtcagctttatggataaagtgttcaagccgattcatcatctcttcatgagactgataatacgagcagaaattcaagtctccttccagcaagtcctcctcttgatcaatcaaataatcaagaagaatatgaaggccctgtatgtaaggaaaataactgtcgcggatttttttagcggtgctttctgtgaaatcaggctggaacgaatacgcaaccagacagaaaatgcctaacgttgagcctgcacaggctgaaaattcataccattccatctcaggcagctctgattcatattgagtaaaccacttttcaagccgcggaacacgctcatgctcaataacgtgcttatgcacctgcaaatcgcaataatagccgcacagttcaagcagataaggtttaatcatgtcatagtgctcaatggagccgagaacacgctggcacgttttgaccagttcatgcaaatatccgctgtcatcctgttcttccctgaattgataatagttttgcagttccgccccaactgtcagtgcgtcctgcattgaggcatggagcatccgaaaatcctgcgggtccagcgaggtgctgcggtcacacagattgtccaaataatcactaatcgtttgatacgcgatgataaactcgacacatttctgtttttggctgcctgacaataaggccagtatgccgccgccttcacagtgaaacgttttgtcccgaatacttgcggttgcctgtgctttcaattcactgttatgaatcgattctgatttttgcttccatatgtccagctcttgatgaacgagcggaaaaatatctcgatatacctttgccatcaatccaaaaggatgttccggtactgtcaacacatgcaccccctactagttcaaatatattgatcagtaaacgctcttgctgctttaaaaacatcttctctctcgggttcattgaagatctcatggtaaagcccttcccactctctgtatgctttattataagaagcaacaccattaaaccacttgatgaccatcgttttgtcaacaagcttgtcatcaccggcttgcatcacaagaagcggaactttcaaaaatgcctctgtcggcaccattgccgattcaattgtctttaaaagctctctgtaccatctgacagaaactttcctgacgtataacgaatcattttggtcagcctcaatgacgtcctcattgcgcgtcgccatatcaattgataatcccgaatcaaccttaagtgacggagcgatgacattcaggccttttgatgcaagatcaagcgctttattcactttaatttgcagtccgagacacggtgatgataaaataattcccgtaatcttgggatttctttgctgtttaatccattcaatcgcgaccagaccgcccatgctgtgacctagaagaaaaaccggcagatcaaaggttcgcgctttatctatccaagcatctacttcatcaatgtattcttgaaacgagcgaatatgccctctcgctcttgtcgttgttccctgtccaggcaaatcgcccatgacaacgtgataacccgaagaccgccacatttcaatcagccatttatatcgtccatgatattcacttgccccgtgaatgattacaatcacggcaacaggtctgtctgctttccaggtccacatgatcttcacctcatacgaaatttaaatagagaaagaaggatgaatcttatgatctacccttataaggaacacaagccagatatccacccaacagcctttatagctgataatgcaacaattaccggtgatgtcgttatcggagaacagtccagtatttggttttctgttgtcataaggggagatgttgcgccgaccagaatcggaaacagagtcaatatccaggatttaagctgcctccatcaaagcccgaacaagacgctgctcattgaagatgacgccacgataggccatcaggttacacttcatagcgctgttatccgcaagaacgccttaatcggcatgggctcaatcattttagacggagccgaaattggcgaaggcgcttttattggtgccggcagtcttgtcccgcccggaaaaatcattccgcctggccatctcgcctttggccgccctgcaaaagtcatccgccctttgacggaagaagaccgaaaagatatgcaaagaatacggtcagaatatgtagaaaagggccaatattataaatttcttcaacaaacataagacctgcttcgtcttactttaccatttttcaaattatatttgaaagcaataaccatcgttaacccggacgtcataacagttcgggtttcgatttttccataaaacgttcacatatagcatgaaacgtatgacttttatcttatcacaaaactataaacagcctctgcaaaaacacatacctattctttcctgttctctattttctatgagcacacacaaaaagagcccactgggagctctttttgtcagctgatatttcgttcgctggcagctgctgcattttttttgtgaaacccttttccatagtacacagccagcaagatgagaaaccatatcggcccgataatcacggctactcttgtatcaggactgtaagccataagaatgacaacgaatgctagaaatgccaatgacacataagacgtaaacggaaataaaggcattttgtactttaattgtttcttttcttcaggcttcaaacttttcctgtattttatttgagaaagcaaaatgattgcccacgtccaaatcgctccgaacgtcgcaatacttgtaacccaagtaaataccttcgcagggacaacatagtttaacagcactccgactaataaagcgcccgctgaagccagaacagctttacccgggatgccgcctttcgtcagctgaccatatgcttgtggcgcctctttctgttccgccaagttaaacagcatccgccctgtgctgaaaataccgctgttgcatgaagacagcgcggctgtcaacacgacaaagttaatgatacctgcggccgatggaatgcccactttttgaaatgtgagaacaaatggacttccttgagagccaatttcctgccacggataaatagacataatgacaaataaagcgcctacataaaaaatcaaaatccgccaaaatactgtatcgattgctttggctaacgatttttgcgggttttttacttcgccagccgtcaccccgatcatttcaatccctaaataggcgaacatgaccatttgaagagacaatagaaccccttttaaaccatgagggaaaaatcctccgttgttccacaaattgctgattccggttgcaatgcccccattgccgactcctgcaataatcatcaataaaccgacagcaatcatggataagatcgcaacaattttaatcaatgcgaaccaaaattccagctcaccgtaagctttgacagccaggaaattaacacccgtcataatgaccagtgccgataatgcccaaatccagtttggcacgtcaggaaaccagaaccccatatagatgccgacagcagtaatttcggccatacaggtgacaacccataaaaaccagtagttccaccctgttaaatagcctgcaagcggtcccaaataatcacgcgcatacctgctgaaggagcctgcgaccggtttttgaatggccatttccccaagcgctctcataataaaaaacatgaccaggccgcttgcggcatacgctaccaaaataccaggccctgctaattgaatagctgatgcggagccgaggaacaaccctactcctattgcagctcctaaagacattaaagaaatatgcctttcttcgagtccgcggtgcagctcttgtttttgtttttgcatgctttcttctcccctagaaaaaaattcattaaatcatttttctgaatatttcgtatgaattgggtaaaccaatgatgatggagaaataaaaggataacaacaaggctttcgactactcgaaagccttgttgtctgttacacaaagatgacttctttaggctgatggctcagctcttcaggcatataccgtttttcaatattgatgctgtgccagatcataaagattagcacagtccagattttacggctgttatcagccttgtccgcacaatggtcttcaagaagctgaaggacataatccttatggatataagcatccgtttggctttcctgaataatattccgcacccattcgttcatttcgtttttcagccaatgacggatcggtacagggaaaccaagctttttgcggtttaatacgtgctcaggcacaattccttcagcggctttgcgaagaagatacttcgtcgtgccgttcttcgttttcagctcatcaggaatttttgaagcgacgtcgaatacgactttatccaagaacggcacacgcagttccaaagaattcgccatcgtcattttatccgcctttaacaaaatgtcgccgcgcatccaagtgtggatatcgacatactgcattttgttgatatcgctgtacgagctgctttctgtaaagtaagtcttcgtcacatcgcgatatgaaaggttcggattataatgcttcaacagctgctttttgacagactcttcaaagattttagcgttaccgatataacgatcctgaagcggagtgcagccgcgctcaagcaggctcttccctctcataccttcaggcataacggcagcaacgtgcagaagcatctttttcaagccggacggaatccgttcaaacggtttaagcgaaagcggttcacggtaaatgttatatccgccgaagagctcatccgctccttcacctgataaagcaaccgttacatgttttttcgcttcttttgcaacaaagtacaacggaatcgctgccggatcagcaagcgggtcatcaaaatgccatacgatcttcggaagctcattcatgtattcctcaggcgaaatgactttgctgatattttcaatgcccagcgccgctgccgtttctttcgctacatcaacctcactgaagccctgctgttcaaagccgacagagaatgtttttaagcttggatgaaattccttcgcaacagacacaataaaggaagaatcaatcccgccagacaggaacgaaccgacaggaacgtcacttctcatatgaacgtttacagagtcatagatcgcgtctcggacttctttcacaagcttgtcttcttcagtctgaaccggcttgaagttcgctttgaaatacgttttgaatgtgatatcgccgtccgggcggattgtgaactgtgaacccggctctacttttttcacatgggcatcaagcgtgcttggttcaggaacaaattggaaagacatgtactgctgcaatgcctctttatctatttcaatatcattctgagcaaccattaaactttttctctctgaggcaaaataaacctgatcattgatcgttgtgtagtacaacggtttaatgccgaatggatctcttgccccataaagcacatgatcgtttttattccaaatcagaaaggcaaacataccgcgcagtttggacgccgcttcttctttatagtgacagtaagtcgcaagaagaacctctgtgtccgaatccgtgttgaatgtgtacccctttgcttcaagctcttctctcagttcaatatagttatagatttctccgttaaagataatccaatatgtttcatcttcatatgataaaggctgtccgccattttctacatcaataatgctgagccgtctgaatccgaagccgacgtgctcatcatggaaatatccatcactgtcaggaccgcggtgaacgatcatttggttcatttgtttgattagttcttcttgatcagcggtttgagctaacggatgcttgttaaaaaccccgacaaatccacacatagtattgcctccataattaaaattgtcatcattgaacccctatttatagacgctgtgaataatatttggtttcacagttatgtaaaaaaataaacatgaatacaacgataaaaaagggaaagccgcttaaccagtaagcggctataaaattattctcctaacgcttctttacgcagctgctccgctttgtctgtacgctcccaaggaaggtcaacatcgtgacgtccaaagtggccgtacgcagcagtttgtttgtagatcggacggcgcaaatcaagcattttgataatgccggcaggtcgtaaatcaaagttattgcgaacaacttcaatcagtttttcctcagaagcttttcctgaaccgaatgtgttgattgagattgacacaggctgtgcaacaccgatcgcgtaagcaagctgtacttcgcaagaatcagcaagctcagccgcaacgatgtttttcgcaacgtatcttgccgcataagctgcagaacggtctaccttcgtcgcgtccttacctgagaacgcgcctccgccgtggcgtgcatagccgccgtacgtatcaacgatgattttgcgtcctgtaagtcccgcatccccttgagggcctccgattacgaaacgtcctgtagggttgatgaaatattttgtttcttcatcaatcagctcttcaggaacaaccggattgattacatgttctttaatgttgcgctgaatttgctcaagtgtaatttcagggtgatgctgagttgaaataacaatcgcgtcaatgcggactggtttgttattttcatcgtactcaaccgttacctgtgttttgccgtcagggcgaaggtacggaagaatatcttctttacggacttcacttaggcggcgggctaatttatgggcaagtgaaattggaagaggcataagctctttcgtttcgttgcacgcataaccgaacattaatccttggtcacccgcaccaatcgcttcaatttcttcgtcgctcattgtgccttcacgggcttcaagcgcttggtctacgcccatcgcgatatcagcagactgctcatcaattgatgttaaaaccgcacaagtttccgcatcaaatccgtattttgcacgtgtgtatccgatttctttaatggtttggcgaaccgttttcggaatgtcaacatacgtagaagttgtgatctctccgcttacaagaaccaaacctgttgtcacagatgtttcacaagcaacacgcgcgttagggtctttctttaaaatttcatctaaaatgctgtcagaaatctggtcacagattttatccggatgcccctccgtaacagattctgatgtaaataaacgacgatttttactcatgatttgcttcctcctgcacaaggcctcccgaaagaccttgtatatatgatacggaactcgctccctcttatacaatgtacagttatattagagaatgttaattggcatatttatgaaataaaaaaaccttttccatcgaggaaagggtttggtctttgtgcctttcactcttatcgctcaaggaatcatacaaccttgcaacaggttagcaccttggttgtctcactcagttgaacataataaataacagagaaaccggttgctgggcttcatagggcctgtccctccgccagctcgggataagagtatccgctcaatgaaatatcttatcgtaaaagggtttgcaatgtcaatatgattcagaagaaataggcacctatattgagggaaaacaatggaaatgcacacacaaaaaacaataaatagtatagactatttgaaaatatatgttatactaattcacaattagcaaaacacaaaaaacgataaaggaaggtttcatatgaactcagttgatttgaccgctgatttacaagccttattaacatgtccaaatgtgcgtcataatttatcagcagcacagctaacagaaaaagtcctctcccgaaacgaaggcattttaacatccacaggtgctgttcgcgcgacaacaggcgcttacacaggacgctcacctaaagataaattcatcgtggaggaagaaagcacgaaaaataagatcgattggggcccggtgaatcagccgatttcagaggaagcgtttgagcggctgtacacgaaagttgtcagctatttaaaggagcgagatgaactgtttgttttcgaaggatttgccggagcagacgagaaatacaggctgccgatcactgtcgtaaatgagttcgcatggcacaatttatttgcgcggcagctgtttatccgtccggaaggaaatgataagaaaacagttgagcagccgttcaccattctttctgctccgcacttcaaagcggatccaaaaacagacggcactcattccgaaacgtttattattgtctctttcgaaaagcggacgatcttaatcggcggaactgagtatgccggtgaaatgaagaagtccattttctccattatgaatttcctgctgcctgaaagagatattttatctatgcactgctccgccaatgtcggtgaaaaaggcgatgtcgcccttttcttcggactgtcaggaacaggcaagaccaccttgtcggcagatgctgaccgcaagctgatcggtgacgatgaacatggctggtctgatacaggcgtctttaatattgaaggcggatgctacgctaagtgcattcatttaagcgaggaaaaggaaccgcaaatctttaacgcgatccgtttcgggtctgttctcgaaaatgtcgttgttgacgaagatacacgcgaagccaattatgatgattccttctatactgaaaacacgcgggcagcttacccgattcatatgattgacaacatcgtgactccaagcatggccggccatccgtcagcaattgtatttttgacggctgatgccttcggagtcctgccgccgatcagcaaactaacgaaggagcaggccatgtaccatttcttgagcggttacacgagtaagcttgccggaaccgaacgtggtgtaacgtctcctgaaacgactttctctacatgcttcggctcacctttcctgccgcttcctgctcacgtctatgctgaaatgctcggcaaaaagatcgatgaacacggcgcagacgttttcttagtcaataccggctggaccgggggcggctacggcacaggcgaacgaatgaagctttcttacactagagcaatggtcaaagcagcgattgaaggcaaattagaggatgctgaaatgataacagacgatattttcggcctgcacattccggcacatgttcctggcgttcctgatcatattcttcagcctgaaaacacgtggaccaacaaggaagaatacaaagaaaaagcagtctaccttgcaaatgaattcaaagagaactttaaaaagttcgcacataccgatgccatcgcccaggcaggcggccctctcgtataaaaaacaaaagccaagagcaattatgctcttggcttgttttaattgacggaatgcaaagaagtcagcttgtatgtaatgatggtccggccttcttcccattgaagcttctgcacttcagctgtgcctgacttttcgccaaactttgttttgcgtacatccattggaatctccatcggatatactcggtatccgtccttctctaacgtgaatatattttcatctatgcgaacttcttttccttttgtcacaatcagtgtattaaattcaacaggcattcccaaagtgaaatcccctttcgttctcttttttctttatcataacatatttcactgtcagcggtttttcatccattgtgtgagctgccgcacgatacgccggttttcttttggcgggaaataatgtgtgaatgtactgtagtaccacgtctccaccggcttatgcagttgttttagcttctcttcaaataaataggaatgctgaattgaaacattttggtctttttctccatggattaacagcacgggagcctgaattttgtttacttggtcaaacggtgtcctccattgatattcctcaggcacctttttcggtgttccgccgatgactcttttcatcattcgccgcaaatcctgccgctcctcgtatgtaagaatcatatcactgacgcctccccaggaaacaaatgaagctgcctgcccgcccatttcgatcgcagtgagcattcccataattccgccgcgggaaaaaccgaagatgtggattctatccttcttgacatttgggtgctgctgaagcaggcgaaaagcagaaaatgcatcctccctgtcttctcctgcaaaatcctcattgccttctcctccttgatttcctctgtaaaaaggagcaaacaccacaaacccttgggatgcaaactggataatccggcccggccgaaccatgcccacgcttttaatcccgccgcgcaaatataaaaatccgtcatattgtcccggttccgccggctcagccagaagccccttaacccgtaatccatttgacagatagcagatcgtatacaaacgcacatgctggcttggcgacggaaatcttcttttctctacaatcaaaacagccgcctcctttttttctatatgctttccttactccaaaattacatccggagaacctggttaggcattcacacatttttatacccatcatacgatatgtaaagcaaaaaaggatattaacttgatgcgaaataaggaggttgtctatgtgaacagatggttaaggctgagcttcgcctgtgtcggcagtatctttctgatgttcgccctggcggcttgcaagcaggaagaaacgctcacaaaagtcaaggtcgctgaagtgacccattcaattttttacgcacctttatatgttgctgagtctaaagggttttttaaagaagaagggcttgatgtcgatgtgaatacgacctggggcggagataaaacgatgacatcgcttctttccaacggctccgacatcgcgcttgtcgggtcagaaacatctatttatgtcgaagcgcaaggggctaaagatcccgtcattaatttcgcccagctgactcagacagacggaacgtttcttgtcgcgagagaagatgttgaacacttcgactgggatcagctgaaaggaaaaacgtttctcggtcagcgaaaaggcggcatgccgcaaatggtcggcgagtatgtactgaacaaacataagattgacccgcgtaaggatatagacctcatccagaacatagacttcgccaatattgccaatgcgtttgcttctggaaccggtgagtatgtacagctctttgaaccgcaggcttctctctttgagaaaaaaggcatcggccatatcgtggcttcattcggagaagaatcaggagaggttccttatacgacttttatggcgaaacaaagctatttgaagaaaaatgaagacacagccgtcaagtttacaaaggccatttataaggcgcagcagtgggttgaaaatcattctgcgaaggacatcacagatgccattaaagatgaatttgatgataccgacccagacgtcatcgaaacatccattgaacgctataaaaaacagcattcatattcgccagaccctctgcttaacgaaaaagaatgggagcttctccaaaccattatggatcaatcgggagaactgccgaagcacattccatacaatcagcttgtaaataaagaaattgctgaaaaagtcacctcggagaaataggaggcgccatctatgtctttcttacatgtcgaccatgtaacccatacttatttttctattaaagaaaaaacaacggctgtgcgggatattcatttcgatgccgaaaaaggcgatttcatctcatttctcggcccaagcggctgcggaaaaacaacactgctttccattattgccggtttgattgagccatcagaaggcagagttctgattgaaggccgtgagccgaatcaaaaagaacataatattggctatatgcttcagcaggattacttatttccctggaaatctatcgaggaaaatgtgcttctcggtttaaaaatcgccgacacgctgacagaagaaagcaaagccgctgcactcggtctattgccggagttcggcctcatagatgtggagaaaaaatatccgaaagagctgtcaggcgggatgcgccagcgggctgcgcttgcaagaacacttgcgcctaaccctagtctgcttttgctggatgagccattttccgcgcttgattttcagacaaagctgtctttggaaaacctggtattccgcacattaaaggaatatcaaaaaacagcagtgcttgtcactcatgatataggggaagcgatagcgatgagcgatacgatctttttattttcaaatcagccgggcaccatccatcagatttttaccattcctaaggaattggccgcaatgttgccttttgacgcccgtcaggaaccttccttccagacactgtttcaaacgatatggaaggagctgaattctcttgagaaacagcaaagaaaccattgatctgcttcacgagcagtatcaattcaaacagaaaaaggaaaagtggaaggtccattcctttcagcttgccatatttattctctttttctcgggctgggaaacctccagcaggcagggctggatcgatccgctgatcttcagctctccatcagctgtgtggcgattattgctggagaaacttggtgacggttctttactgtcacacatcggcgtcactttatttgaaacggtgcttggctttttgcttgggacgtttatgggcacgtgcctcgccgctttgttatggtggtctaaccgacttgccagaattttagatccgtaccttgtgattttgaatgcaatgccgaaagtagccctgggcccgatcctgattgtcgcgctcggtcccagttttatcagcatcattgcgatgggagccatcatcagcgtcattatcacaaccatcgttgtctataccgccttccaggaggtcgacgaaaactatacgaaagtcatgaaaacattcggcgcaaaaaagtgggttatttttaaagaagtcatactgcctgcatcctcccccgcgattatttcaacactaaaagtgaacgtcggtttatcatgggttggcgtcattgtaggggaattcctcgtttcgaaggtcggattaggatatatgattatttacggattccaagtcttcaattttacactcgtcttcttaagcctgctgatcatcgccatcttcgccactctgatgtatcagggcgtcgagctgctggaaaagaaatggacgaaggggaggacataaaaaacccggcacatgtgccgggttttttattcaatccatccagattctttcagttttttcaaactgatcggaagtacggaatccttcataataaagctgaattttttattgcgggaaaggttctccggaagctcgtgaaacaaaaccgggcctttcgtttcaaagtaatcagcttgcttttcaagcttttctatatctgcaaaatatatatttttcacaatcactttttcttttccgagaactttatactgtccgagatacttgaggcttttgactctcgcgcccgtctcttcctttacttcccggagcgcagcctcttctgcgcactccatcggctctactttcccgcctggaaactcatagcctctgtcctcatgttctgttaaaagccatttgccgccaaaacggcaaatcacccagacatgcttcgggctgtccgagaaaggctgatcgtcaaaggaaagctgaacagtattctgataataatctttaaactcgtacatgtttatccctcaaatccgttcctagctatcttccatacatcataccacagttacgtttcttcggaagccttttatcaaaaaataagggaaacccagcacgccgtcaggttctgcatgcagactagctcgtacagtttttttgcgatagcttttgccgaaaagtgcgaccgacgctctgggctttattatgacccgcgaacagggaaaagttacggtttgcgcttaaatttattttttaacgtttctaaaagatcgacaagcatctgaggaaccggtatgccaagagaactggctgtcacaacaatttgcacagattcataaagaatataaaacataatagccaagtcacgaattgatccctctgtattcagcagctgatcaaaaaagtggcatacagagatcagagccagcgtgactaattttttgacaagccgggcaaatacctttttaaatgacagtttgtgaataatggtttccttcaaagtcgtactgataaattcaattgccataagagagagcaaaatcagaaatgaatactgaaaacctccaaagaaaaaacccgctgctgaaacgctgactgctattaacgaaaagatgccaaagtctctatccatttatcccaacatcctttcacagaaacggccttacgatattctatggaaaacaagccgaacggattggatttttcagaaaaatggactggttgtcgcctatttttcagatacaaaaagaaaagccggacgtcttttttaagacatccggccgttctttttttggacttaacctaggtaagcttttagcatccagttatgtttttcaatattttgatggatcgcaagaagcatgtcccctgttgtttcgtcaccgacttcatcagctaaatccatgccgtttttcagctcttccgcgatgactgtgaaatcatcatatacgctttgaaccatttgttcagctgtttcatttccagccgcttctttgacagaagccgtttctaaggattccttcattgttgcaatcggttttccgttcagcgccaaaagacgttctgctaagtcatcaatataagttgccgtttcgttgtacagctcctcaaacttttcatgaagagtgaagaaatcttttcctttcacataccagtgatagttatgtagtttcacatacatgaccgtccagttggctacttgtttgttcactgcttgaatcaattgttctgacatggtatctcctccttgttatatgactatgtatacccttaatatcgtacgctaaaacctcttttttacccttatctgtcacgatttcttctattatgctacaattgttaaaaaacgggaggtggaatgtcatgacgcttctcattacgataagtattttgattgtgctggctgttttgcttgtaaccatttggacgactgtaaaagcctataatgtaaagcataccattgatccaccacaagaaaatcactctgattcacacaatcaatgatgatgtgaatgttcctcttctgactgattgctggcagcatcggcgtctccgacttggacttttaaggtcggcatgctatgctgtttttttgctgtgacatgggattggacagtgtatacaccatcttccttaaacgtcgtttccaatcggtatacgcctttttcttgtttcgccttaaacatttggcttgcgtctttttccccttctttccatacttcaaactctacttcatcggcatccgtcacagcttcatcaccatatgatacggctgcttcataagcagcgctttctccgggatttactttttcaggcccggtcagcttgacatccaaaacctcgggcgtctcagctgtatttgctttgctttcaccagatccgcatccattaagcaataaagcagaaaaaagcagaacaaccaacatctttttcatgccatcaccctttcatcgtttacctaaatagtagcaaacgcttacagcaaatggtacataaaatatgagacgtcacaaaaaagacctttttgcttatgcgcaaaaaggtcctttctattttagccaaatacttttagcaattcttctttatcctgtgaaagccagaaacgcattaaacgtttagcgccttccagatcatgaagcttcgcttggccgcactgcttttcattcgcagctggtatttctgtaatctctaccgcttccttcattgtgtcttcaagtagatcaacgatttccgctgatgtcggctctccgctcacaactagataatagcctgtctggcagcccattggagaaatatcaatgatatcaaaatgatcgtatttctcagcgtgagaacgaatcgtaaacgcgagcaaatgctcgagtgtgtgaatggtgtcaggcttcatcgcctgtttatttggctggcaaaaacgaatgtcaaatttatttacaacgccgtctgttcctactttatgcacgccgcaatgtcttacatatggagcaacaaccgcattatgatcaagctcaaaactttctactgaaggcataatggcactctccccttttttaaaaatgtaatttcattataacatacttttccgataagaattattgattaacttttcaatctgtgttttttttcttatacttgcatcagaaaggttgctgaagaaacatgaaaaccctattcatcgctctgatcagaggatatcaaaaattcatctcgcccctgacaccgccaacgtgccgcttttatccgacctgttcccaatatggaatcgaagcgattaaaacacatggcgctttaaaaggcggatggctgacaatcaaacggattttgaaatgccacccgttccatccgggaggagtcgatcccgttcctgaaaagaaacaaaaacattaattgttataaccgtttacgataagatccagttttccggttttaggatcaatgactaagccatggaccggaacgttttcagggaacagcgggtgatgtttaataacgtctacgctgtctttcacactcgcttccactgaatcaaagcttttaaaccattgatcaaagtctacaccggagtactttattgtttcgatgcgttcttccggaatccctcttgctttgattttttcaagcatgcttttgctgctgattttgctcatgccgcaatcgtgatgcccgatcacacacacctcatctgcattcagctcgtacactgcgacgagtaaacttctcatgatgcttccgaatgggtgtgtcacaagcgcaccggcacttttaatgattttcacatcaccgtttcgcaaattcatcgcatgcggcagcagttcaaccagacgagtgtccatgcaagaaagaatcgccatttttttatctggaaattttgatgtttgatacttttcatactctctttgttcagtaaatgtcttgttaaattcgagaatatcatttagaagactcatgttcgttgtccctttctattctttttactcttcaatatatcacaacccttgtttattcgtcataataaaaaaagacaaaccctctggtctgccttatttccccatgttatagcgttttttgaactgctcaactcgtccgcctttttcattgaatttctggcggccagtataaaacggatgcgtgtcagagcttacttctactttaatgacaggatatgtgtttccgtcttcccactctgctgtttcattagatgttttcgtagaggtgctgagaaaacggtagccgctgttgacatcctgaaatatcactttgtggttcttcggatgaattccttctttcatgtgaatctcctttcaataaatcgtaataattacgttttattctataaccttacaaacgttttgtcaatcttcttatatccttccctctgttttcacatcgtaaacctcatggcatttaagaataggaagaataatctaaccgaggaagcaaataataaacccaaaatacatacagaacgtctttttagaaaggtggtttacgattgtggatgatttagttttggccagaagcctctttggcacgacaatgggctttcatattattttcgcaacgcttggagtcggtctcccgctcatgattttagtggcggaattgatctatcaaaaaacgaaagatgaccattatgcgatcatggcgaaaagatggacgaaagcacaagccgttttgctgggggtcgccataccgaccggaacgatcgcgggcactcagctcgcgcttttatggccgggatttatggaagtcattggccgggtgatgtccctgccatttcaaattgaaatctatgctttttttgttgaagccctattcatgtcgatttatgtatacgctgcagaccgtttgtcacctgcaatgaggattgttgctgttttctttgtgttagtcggggcagcagcatcagctgttctgattacgaatgttcacgcttttgaaggaacgcccgccggttttaaaattttaaacggaaaaattacagatgttgacccgtgggctgcgttttttaatcctagcttttttatcactgccggccatgtcgtgctgtccgcgtttatgaccggtgcatttatcgtggcttctgttgcggcgtataaaatgatccggacgaggaaaaaggaaaaggtctatcgctttcaccggaaagcccttttgctcgcactgacgatcggcggtattttttcattgctgaccgctttgaacggacacgaatctgcacagatgctgtacgaataccagcccgaaaaattagccggtgcggaaggcctgtttgaaacaagatcccacgccccgctcgctatcggcggttttaccgacccgaatgaagaaaaagtaaaatgggcaatcgagattccatgggctttaagctttttggcagcgaaccgttttgacactgttgtaaaaggattaaatgcatttccgagagatgaatggccgccgcttttcattcacacgctgtttaatgcgatggtcggtgtaggcatgctgcttattctttattctattattggtgtggtctggagaaaggtgctcaagaaagaccgtttcccaacgtggcttttggtcattttcatgacagcaggcccttttagtctcatcggcattgaattcggctggattttcgcatgtacggggaggcagccttgggtcatctatcatttgctgaaaacatcggatgtcgtaacaacgactggttcgatcggagtgctcttcttgtttttcacatttgtttatgccgtgttaggcgctgctgtcgtctacgtgctgctgtactatttccgcaagcacccggttgacgaagatttaaatacagcggagtcgtaatggctccgcaaacaggaaaccaaatggaaggagatcgacaaatggagatttcaactgacgctctgatcgccatctcaattatctggggctttgtgtttatttacgccgtcatggcgacaatggattttggagcgggattttggtctatgatctatttaaacaaggagcatatgaaggccaccgatattgcgaatcgctttttgtccccgacttgggaggtcacaaatgtctttattgtggccatcgtcgtggcgcttttcagttttttccccggcgcgacatttgtgctcggcaccgttttattaattcccggaagcatgattttactgcttttagcgattcgaagcggatttctcgtgttttcaaatacagcaaaggagcggaaaacgctaagatatatttccggcatctccggctttatcattcctgctattttaattttggtgcttcctgtgacacacggagggtttatagaaaaaacggatggaatctataacttaaatatgtctaaaatcttttcaagccccaacgcctattcatttatcgggtttgcgattttaagcaccttatttttgtcctcgctgctgcttgcagatgtttcaaatgtggcagaggaacaggatgcgtaccgagcctacagaaaaagcgccctgattaccggcccgatttcactgttgtttgcagtatgcattatggtgacaatgcggaatgaagcaaactggctgtacagcggaatgatgaatgattttacttggattattgcatcgttcattacatttgtcattgctggaatcgccctttttctgcctaataagagctttgggcaaaacatcggaaaaccgcggcttgcacttgtcgcgattgggatacagtattttctcgcaagctacgcgtacgggcgggcgcatcttccgtatatgatttatcccgatgtgacagtcatgtcaggcttcacagagccagcaacgttcagagcgctgtttgcaacgtatatcgttgcatttatcattctatttccgggcttctttttcttctggaaaatgtttatgcgagataaacgctatatccgccaggaggaatagagggcaagccagccggctatactaatccagaacctttataaggaggggatggcatggagcagaaaattctatgtgaggtcaacaactgttcttattggggcaaaggtaacaaatgcaccgctgatgccatttatgttgtcagccatactggtgaaacggctgaaaacagccgggaaacagactgcaaaacgtttaagccgcatgatttgtaattaaaagaaagagctgcatcagccagctctttctttttgcatgttgagtgttctcagctttttagttatgaccccgtttgcaggtgaaaacaaaaaggcgcttgcataacatacacctgtcatggccgccatcgctcctgaaatcgaaacattaagccacgttgcgaagaaatagcccatgaccgccgacagcccgccaatcaacgcgctgagaatcagcatataaagaagccggtctgtcagcaaatgtgccgcagccggcggaacaatcagcatggccacaaccaatacggcacccaccgaatcaaaggaagcaacagtcgtcaaggacagcatgcccatttgcacgtaatgaatgagcaaaaccggtattcccaaggctaaagccatttgaggatcaaacgaagcgattttaaactccttatagcacacactgatcaacactacgtttaaaaccagaacagatgccagcatccaaaacgctttcggcccaatatcaaccccgaataccgtcaccgtattccacggcacaaaagcgatttctcccattaacgagtgctcaatatcgagatggacattcgctccatacacagaaagcaaaataaccccgattgcaaataaggatgtaaacacaactcctatggcagcatctgattgaacccccttgctatgaagaagctgaaccaagaaagccgttaacagaccggttgcggctgcgccaataaacatataaatcccatcgagacttcccgtcactagaaaagcgccgacaatgccaagcaacactgtatgactgattgcgtcggccagcatcgccatgcttctcagtacaagaaatgtgccgatcaatccgcagcttacaccgactaatacaccggtagctataatccatgcttcaaaactcattcgcgatctgtcccttctcggcatcatgagacacttttcgaagctcaggcatccgtccatacagctttaagagtgaataaagccgctctctcgtttctctcggtaaacggtccgggtcaaagtagtcctgatcggattctatattggcaagttccatttcatgcatgagatacacttcatacatccgctgcttcaaagctgtgtgatagcctttttcaatccctttgcttgtgatttgccaaatcccattttcgatacgctcaatgcacctctcttgttccaagtcatttaatgccttaaggcataatgaaggggataggcgtcttttctttcttacactttcaacagttacacaaagatttttcttttcatactgttcataaatcgccaaaagcacttgctccctgcttgttctgcgccgcagcctcatcagccttatggctttagcagccaatccccgcttaggcgcgcaaatcattgaaaaaagaaagagcagcgttgcagataagatcattaatggccctgtcgccattcccttcatcgtggtgctaagcagggttccggccactccgctgaccccgcctgtaatcccggcaatgatgatcatcccggttaatcgttcggtccaatatctcgcggttatggcaggtgtaatcagcatagccgccattaatatcacaccaacagtctgaagcccaatgacgacagcacagacaatcagacaagccaaaagcccgtttaaaaaacgcaccgggattcctaatccctttgcaaacgcgagatcaaaagtaatcaatgtaaattccttaaagaaaacaatacataggagcagcagagcagcggatatccctgcaataaggatgatatcctgcctgaccaatgaagcagcctggccgaataaaaaagaatcaagcccgctttggcttcccgccccctgttgctgaatatatgtcagcagaatgatcccgacgccaaaaaacacagaaagaacaatcccgatcgccgagtcctcctttgtttttgaaagccgaggaatcagctgaatacaaaacgttccgagcagtccggcgagcgctgcccccagcaaaaagaaaggcagtgatttttgcccggtgaacagaaaagcgagacacactcccggcagagctgaatgggccatcgcatcgccgattaaactttgctttctcagcagcacaaagctgcccaaaacaccgcttgccgtcccgagcaaaagcgtaccggccagcacccactgtgtattcggatgctgaagctgcagccacaaactttcaaacattgcgctcactccttatgtccttctgccagcactttatcttttaaaaacgtaagccttcctccatatgttttttgcaggttttcgatcgtaaaaacgttttccgccggtccgaaagcgattttccttaaatgaagcagtaagatccaatcgaaataatcctcggcggtctgcagatcatgatggacgacaagcacggtttttcctttttctttgagctctgccaacagcgtcataatcgcgcgctccgtcgctgcatcaacacctgcaaacggttcatccataaaataaatgtcagcgttctggcagagtgcccgggcaagaaacacccgctgctgctgtccgcctgacagctggctgatttgcctcttcgcataatcatgcatcccgacttttgttaatgcggccttcgccatctccacatccgctttctttggcctctttaataaaccgattctcccgtatcttcccattaggacgacatcgagcgggcttgtggggaaatcccagtcaaccgagccgcgctgcggaacatatccgattctggtccgctgatccttatagtctttgccgtaaatagagatgtctccggaagctctgggcacaagaccgagaatcgttttgatcaaggttgattttcccgcgccgtttgggccgataatgccaataagttttccttcaggcacctgcagcgaaatgtcctgcagtacaggctttttatgataagcaaccgtcacattatcaagctcaacagggaacatatcctccacctcttttctttatttaagcgctttagtaatcgtgttgatattgtgacggaacattccttcgtatgtgccttcttttgtgcccttttcacccatggcatccgaataaagctgaccgccgattgtgactgtatggcctttttctttagcgccttccaccactgcattgattgatttttcagatacactgctttctacgaacacagcttttatttgtttttctgtcagaagatcaaccagctcctgaacatcccttaatccatagtccgaatctgtgctgagtccctgcaggccttttaccttaaatccatactcattcccaaagtacgcaaacgcatcatgagcagtcacaagcacacggcttttctccggaatatgtgcgatctccttacgcgaccacttatctaaatattgcaaatcttctttgtactctttggcatttttccgaaaggcatctgcgtgctgaggcattgctttgctgaattgcgcttcaatttcatccaccgcatagatccataacggaatgctgaaccagacgtggggatcaaacgtcttgccttcccccgcgggaataagcttatttttcggaatggcctcagctactgccgccgattgtttttgttcgccgattttttggaggacatcctccattttcccttccaaatgcaacccgctgtacagaacaacatcggcagacattaattttttcgtgtcaccttgggaagctttgtaaaggtgcggatcaacccccggtcccattaaagaggtgacttttacatgcttacctccgatgttttctgctgcatcggcaatttgagatgttgtcgctgtcacttgtaattgctgatcagcgctttttccggctgaatccgttccgcatcccgttaaagcaaaggtcgcaaaaagtactgctgccatcagcccttgtctcatatttctcctcctctttgccatcaatgtccgattgttttatcttatgttgtcagttcttagacatgtgacattaaattagccaaaagcatgttttatttacacaggacaaaaagtttcccttatgcaaaattatcgcgtttggccatttttgtcaagctgatttacataaaaaaaccggctgggtcagcagccggtccaaacgagaagggatgtattcaacgaacacttttactgtaacagcacagtgtcatttattcaaaatagcaaaatgcttttttcttaaccatgctgtgtgaaaacatccattttggtcacatattttcgcataatatcttggtttacctcaacccctaaaccaggctgttttgacacagaaataaatccattatcaatacgaatatcaggagttacaatatcttcatcccaatagcgtgaggatgaagatatatcgccaggtattgtgaattgaggcagtgaagcaagcgccacgttctgcgctcttgatatgcctgtttccagcattcctccgcaccaaacctgcatatgatgctctttgcataaatcatgaatttttaaggcttctgttaagccgccgacacgagaaggttttatattaataattttgcagcttcctagctcaatcgcccgtctcgcatcatcaactgaacaaatgctctcatcaaggcaaatggccgttttcaaatgtttctgcaagtggcggtggtcaacgatatcgtcagcttggagcggctgctcaatcatcattaaatgatagtcatcaagctcctttaaacggctgatatccttcagttcgtaagaggaattggcatcggccataagcgggatgtttgggaatcggctgcggatggccttgaccaattccacatcctgcccaggctgaattttaatttttattctttgataaccttctttttgatagctctcaatttccttcagcatatcgtcaagaggcgccaggccgactaccaccccggcagggactttatctcttgttccgcccaatgcctcagcaagggatacgcccttctttttggcataaatatcccatacagccgattcaagtcccgcttttgccatccggtttcctttataccgcgccaggctgtccggcacttctgaagggtgattgaattcacggccgacgacatttgggataaaaaaatcttttagcatatgcaaacatgttccaatggtttcctcggtgtaccaaggcgaagagaaagcggaaacttctccccagcctgtgacacctgatgtatcaatggcttccacgatcagaaatttacgctcttgaagcgtttcgatactgtttttaaacggtttctttaagttcatgctcaaatggtaaagcgtgattttttctatttcgatcatagcagttctcctttacgcgcatccttcagctgatttcgcaagagcttattagacgcattgcgcggcaggcggtcaagcacaaagaattttgccggaattttatacttcgccaagcgttctttgcagtagtcagtcaattctcctgcgctcacaggcttgtgaaggacaagataggcgtgaggcactttcccccattttttgtcctcagcccctgaaaccccggcttcggccacagcggggtgtgaaagcagtactgactccacttcggccggataaatgttttctccgccggatatgatcagatctgaacgtctgtctaatacatataaaaagccttcattgtccaaataaccaagatcacctgttttcagccagccattttgaaaggaggcttcgtttgcgctctcccggttaaaatagcttttcatgacattcgggcctttgaccatgatttcaccgtgttcatacggttcacatacctgtccgtcccgctctattttgatttcacatgaaaacagcggtttccccgcagatccgagcttttccatactgaattccggcgacagggtaacaatttgtgagcatgtttctgtcattccatatgactgaaagacagggaatcctttctcacggcattcctcaagcaatggcagaggtgcagggccgccgccgagaagaatgcatctgatggattcagggcagcggcttgtttcttccaaaagactggccagcatagtctgcaccgcagatatcattgtcacttcatgcctgttgatagaattcagcacatcgcttacggaaaaacgctggtgaagcacgacagtcattccatagatcacagatttaaataatgcggacaatccgctgatatgaaagagcggcaatgcgataagccagcggtcttgttctgttatacccaaattaagcgcggacgacaccgcactgaaatagtggtttccgaacgtttgctgaactcccttgggctttcctgtcgtacccgacgtatacatcagcgttgccgttgcatccatttgcatataagcctcgatctcaatttcctctgctgcttctttcatcagttcatccacatcaatcgtttgaacgatgtgttgatattctttcttctcaaagcttgaatctgtcaataaaaagccggatcccgaatcctccagctgaaacagcctttcatgtgttgacagcttcgtattcaaaagcaccgccttaacaccaagcaaaaaacaagcgtgaacagcgtataccatttctgcacggttttggagcaaaatagctgcagtatcccctttccgaaccgaatgagcggcaagctgttccgccattcgtttagacgcggcaaacaattctgcaaatgtcacggtttggtcttcatagatgagagcgattctctcaggtgtcagctgtgcccgctgcatgagccagttgggctgttctgtcagcatgtcatcatctccgaggtaaaatgtctgtattgaaaagaaaacagcttggaccgcaaagtctcaagctgttggtttactaggtattgctgatcacggaaaacgagggaactgtccgaaatcaggtttgcgtttttccttaaaggaatcacggccttcttttgcttcatctgttgtgtagtaaagaagggtagcatcccctgcaaactgctgaattccagcaagtccgtctgtgtccgcgttaaacgcagctttaagaaagcgcagtgcggtcgggcttttttcaagcatttcttcacaccatttaatcgtttcttcttcaagctgttccaaaggaacgactgtgttgacaagacccatgtccagtgcttcctgtgcgttgtactgacggcataggtaccagatttcacgtgcttttttatgtcctacaattcgagccaggtagccagaaccgtaacctgcatcgaagcttcccactttagggcctgtttgtccaaaaattgcgttgtccgcagcaattgtcaagtcacatacgatgtgaagcacatggcctccgccgatcgcatatccggacaccatcgcaacaaccggtttcgggatgacgcggattaaacgctgaagatccaatacgttaagacgcgggatctggtcgtctcctacatatccaccgtggccgcgcactttttggtctccgccagaacaaaatgccttgtcccctgcaccggcaagcacgataaccccaacgttttggtcgtctcttgcgtcagcaaacgcatcaatcatttcagcaaccgttttaggggtaaacgcattatgtacctcaggtcggttgattgttatttttgcaatgccattatacgtttcatacaatatctcatcgtatgtccgttttgttttccattcagccatatgatgacctccttttattctctatgtgaatgagtcagatgcttgtcaaaaactcactcactattttaccaaacaatcgcggctgttccacatggaccgtatgtcctgcttttggaacaatctctattctactagaaggaagcatcttatgcacctcttgattgatggcgcaaaatttttcgtcccactccccgcagataagaagcacaggaacatctatttcctctacacggctccacaaggaaggctgtgaaccggtgcccatgccggttaaactgttcgcaagcccaatcttattgttccgcagacggcccgatcgtatcctgtgccgaatatcttcagccagcctctgctgagatgaaaacaaagggatattctcccaatacgcaacaaacgctttgagcccgtctcgtaaaataaaatcagcaagcttccggtcccgcatgattcgttcccgccgttccccaagtgttttgagccccggcgtcgtgctttcaagcacaagtgccgatacccgctcgggatatgtcatcgcgaaagagtaagcaagccttcctcccatagaatacccaatcaatttcactttgtgaagttttaattgatcaaaaatctcggcaaggtcagaaacttgccggcttgtgctgtatcttttcccattcagcggggcatcggtttccccatgccctaaacaatcaattttgatcaaacgggaatcaggcagcatttcatcaagaaaagtccatgattgtttgctgccggtaaacccgtgcagacagacgacggcttcggaagcattcggtccctcgtctgccactgcatatcggacaccatctgataccgttatgtttacagttcccattgttttttcacttcccgcacagcctcattcagcatatcgcgatgaagctggactcttgattggcgatccgttttgatttcaatcaaatggagtccgggcttgtctgcctgcggcgcgtaagctgttttgaattcatcccaagaagccgggcatgaatacgttccgccgtaaagtgcagcggcatgcttgaaatcgagccctgtcggtgtgccgaacaaatcttcaaagtgtgtcttctcagaagcctgcggcaaaaaggagaaaatccctcccccgtcattattgacaagaatcacagtaagtggaatacccagctttttggccgccagcaagccgtttaaatcgtgataaaaagataaatctccaatcacaagggtaacaggcgcttttgttccttcacatacccccatggcagaggagacgacaccgtctatcccgtttgctccccggtttgaataaatccggaaagggcggtcctgcttttcgaaaaacgtatcaacatccctgatcggcatgctgtttcccacaaacagcgagctgttttcaggcacaagatgctgaaggattcgatagagattgccttcaaacgaaacatcttcactgctgattgtttgcagatgctcgcggaaccgcccattgacaaactgccacttttccagccactctgaggatctggcagcagcagtaaggcctcccatgatctcctcagcaaaaacagacgcattacaatgaatcatatgcgcgcttgcctgtgtcgggtctctccaccctccatcctcgtcaatcactatttgctgaatcgcaggatcatccttaagccataagaaaaccggttttgaaacaggcatcggtccaaaccgaatgacaacatcaggacgaagtttccgcttcagctcatcatcttttaaaaacgaatcatacgcatcaataacagtgcttttatcatgaacaccattccgcagattagacagcggatccgctaaaattggatactgaagcgcttttgacagcgcaataatgttttccttatccgcatcactatggagctccccgcagacgatcattcctttttcagcctctgcgagcatctcagccacatcagacagggactctcggtcaacagactgcgtacccgttttcacagacacatgacggcctgttctcattcttccaaacggctcatctgaaagatccggcatcagcggttcgcgcagcggcacattcacatggacaggccccatcgggcgcttttgtgcttctccggcagcgcggcttgccagcgttcggatgtatctcagcatttgcggagactcttcaggaagagcagagtctgtgaaaaacttaacaaagttaccgaataagaagtgctgattaatagcctgcggtgcgcctacttcgcgcagctcatgaggccgatcagcagttaacacaataataggcacccttgaataatgggcttcaaccacagccggataaaagttggccgcggctgttccagatgtacagatcaatagtacgggacgctgcttcgcttttgccaaacctaaggcaaaaaacccggcagatctttcatcaatttggacatggacgctgatatcgggatgcgcagcacaaagaacagccagcggtgtagatcttgagcccggacaaacgacggcgtccgtaattccggaaagggcgaattcatcaataaaacttccgatgtaatgagtaatcgggttgactgtcaacgcctctcacctcctaatgcagagatcatcggcttcaatttaatctgtgtttcttcatattccgagattggttccgagtcttccacaataccgcacccggcaaacagccttgcagtgcttccttcgatcagccctgaacgaatggctaccgcgaattccccgttatcctggctgtcaatccagccgataggggcagcataccagccgcgagacatcggttcaatctccctgatcacgtcaacagctttttcctgaggtgctcccccgagcgccggagtgggatgcagcttctcaattaagtcaaaaattgaagcagactcgcgcagctgtccgacaatcggcgtaaacaggtgctgaacgctttttgttttgtacaaaacaggtccatcaggcttttcaacctctgaacagcttgatacaaaagcattatgaatcatacctaccacaatatcatgctcaagcaggtttttctcatcgtttaataattcaaggcctatccggcggtcgtcttcttcattcacgcctcgtttaatggagcctgccagacaggaagacatgacagtgccgccgtctcttttgatcagtctttccggagacgcgccgacaaaggttttgccttcttgttcaattgcaaaaacatagcttgtctgctgatcgtccagaagcgttttaagcaccggttcaatttggattggaccgtcaaacgtgagcagcagctctcgggcaagaacaaccttatcatattgtttctctttaatttggcttgtggccgtttcgattgctttcagccaatcatccttatccagctcttcggctgctgcaatcacagcctgatcttcttgcttgaaatcgggaaccataaattccgccgcaaaagcttttaagccttctaaaacagcttctgcgtcttctcctccgcttacccatctgttaactgttaagaacgggccttcagcagtcatcgtcagcataagcgcaggcacaaagaaatccccttccgagaaatggtcccattgtgaacctctttcttcgcaagggtcaaaagaaaatcctccgaataacacaggtcccactgcagaatgctgcagcttttcttcttcataaatatgaaaagccgtctttttaaagcgctcccattgttcaaaaacctcacgataccgctcgctgtttttttgatttgtctggaaaaccgcttctttgccaagaccgactattgtcaattcactttcaggatctgaccaaaaaaatcgattgcctgtatatttttttgctccgtaattgaaaaatgatagagggtcaagagactcgatttgtctcgaatagcttattaagacagcatggttgacttctttggctttatgtaatgcatgtagaacttcctttcggaacgtacgctgcaccgttgtcaccatgagacattcctccataatccttaaaatgcttttaataccatacacctgtgtctcctttgtgtcaaacacagatcatgcagtccaaatggcctgccttacctattataaacctaatttcagaaatgaaaaagaaacaaagcttaaatttctttctccactgatagcaaaggttgtatccgcttaccataaaaggaaaacctcctatattcctccacccgccatttatgaaagttctcaggcgatctgttcatactaaaggtatgcatcacagagaaacgaggcgatcacattgcttacgaaagaacagcttcagcatttaaaaaatgaactggaacaaacgaaaaaagatatcttaaaccgtttcaaagacaatgaccattttcagcttaactcagcctttccttatgattcgtggggtgagctttcggcatacgacaaccatcccggcgatcaggcgacagaactttacgagcgtgagaaagacatcgctctagacttgcatgagcgagagcaccttcgggacattgagcattcattgaaggcgatagaaaacggtacgtatggcatttgtgaagtcagcggaaaggaaatccctttcgaacgacttgaagcgcttccgactgccacaaccctcgcggagtattcgtcacaggacgtggtttccaaagaccgtccgattgaagaagaaacaccattcgggcaatttgaatttgatgatgatgaagaaatcagagcgccatatgacagtgaggattcctatcaggatgtcgaaaaatatggtaactcacaaacgccgcaggatatggaaaaccctccgctcagctatgatgatatgacgatgaataccgaagagaatatcggcaatacggagtcttacgaaaatttcatcgctacagatatcactggaaaagaaattaccgtttatcaaagcagagcccatgagcgctatgaagaagaacttgacgaagagggaatcatgaccacattcggcgatctccacgctgattgaacccccaattattgggggttcttttccgttttcagcatatcgtaaatcagcttcagataatccttttgcaggccgatgtcataccgctcgccctctagcaatttcccgtatacggtacatgccccgagcgaagcttttatcgcatccgttacctgcacttctcctccgctatcagcttctaatgcctccagctcattaaaaatatccggtgtgaaaatataacgccctgctgcggcaaaatgagacggagggttttgtttaggcttttccacaatatcctgtatgcgataaagccctttttcaacaggctccccttttatcaccccgtaatgatgtaaatcctccgtttttgtttcttttaagccgatcacactggactgatatttcgtatacgcttcaatcagctgccccaaagccggctgattggcggaaaaaatcagatcatctggcaaaacgacggcaaaaggctctccgcctgcaaattgctttccgaaagaaatggcgtcgccaagaccctttgcataaggctgccgcacatagtgaatccgtatatccggaatgggatgctctctaagtaaatgcagtttattcttagaggccaaaaaagcctcaagtgccaaagaggaatcaaaatagtcgacaatcagatttttatggctcgatacaaccatcaaaatgtcctcaatgcctgactcctttaattcttcaacaagataatgaatcacaggcttagatcctaccggaaacatttctttcggaatcaccttcgtcaccggcagatttctcgtgccgaatccgcctgcaggaataatcgctttttttatcatggtattttcccctcagctcatgtttattacatgatattccaagagcgcatcccgatgtttgtacatctgaaattaggcggaagcaactgggcagaaagcggaatcacgaaccagcccttttttaataggatattgatatatgaccagtaatcttgtaaaggagctcaggtgatgaaaatttgtgtggttggcgccgggtatgtcggtttaaccctatcagcggcactggcatccatcggacatgacatgatatgcacagacaaagacgtcaaaaaaatcgggcagctgaaaaaaggagtcattcccttttacgagcctgggctttcagatgcaatacttcgttgcggcaatctctcgttttcttctgaagtgaaatcgagcatggaggaatgtcccgttatttttatcgcagtcggaactccgccgcgttcggacggatcagctgatacgaaagccctgcagtccgtcatcggtgatttaagcgaggcgatccgatcgtataaaaccattattacgaaaagcactgttccgcccgggacaaatgaaaacatagcaaaacagctgattgcctccggagtgtctaaaaacctctttaatatcgtatccaatccggagtttctgcgggaaggcaatgccttatatgacatgctgcatcctgacaaaacagtcatcggtgttcaggaagaagatcacgtatcggcagccatcgtcaaatccatttacaaacacattgataccccttttatcgttacaagcttagcgggagcagagctgatcaaatatgccaacaatttctttttagcggccaaaatttcgtttattaacgaaatggcccgcatatgtgaagcctatcaatcagatatctcagatatttcccgcgctatcggtctagacccaaggatcgggaagcactttttgcaggcaggcatcggatacggaggctcttgttttccaaaggatctgcaggcgctgcaatttgctgcccaggaaaaaaacacggagaccttcctgctccgggccgtgcagcacattaatgacacccagctcggcctgtatatcaaaaaaatacagtcattcttcgaaacacttcaaggcaagaaagcggctgtactcggcatttccttcaaaccgaatactgatgacatcaggaattctcaggctgtcagactgatggaaaggctggcggagctgggatgtgatgttcatgcatatgatcctgaagctgtacttccagaacatttgcggaagcatgtaactcagcattctcaagcttttgatgcgatcgaagaaagcgactttttatttttggcgacagaatggcccgagtttttagcgtttgattggaaaaaggctgcagatatcatgaaagggcgtcttgtgatagacgggcgcaacgtactgaaaaaagaactgatcgagacttgcggcctgatctgtacgggagttggccgtccatgaaaatactcgtcacaggagcagctggctttatcggctcccacctctgcgaagaattactaaaagataagaaacataacgttatcggaatcgatgactttatcggtcctactccattttccttgaaattaaaaaaccttaaaaacctgctgccggaaaagcgatttacgttcataaaggaaaatctgctgacagccgatcttgctcccttactggaaggagtggacgtcatctttcatttggcggccataccgggtgtccgctcaagctggggcaatcattttcacccatatgccgcacataatatccaggcgctccaaaggctcctcgaggcgtgccgggaacattctattcaaacgttcgtctttgcatccacctcttccgtctatggcgaaaaacaaggaaaagtcagcgaaaacacgtcgctttctcctttatctccgtacggggtaacaaagcttacgggagaaaagctttgccatgtgtatcaacagagctttggtattccaattgtgattctccgtttttttaccgtatacgggccaagacagcggccggatatggcttttcaccggctcattaagcagcaccttcagcaaaagccgcttaccattttcggtgatgggcagcagtcaagagatttcacttatatcggcgactgtgtcaaaggcatcaccgctgttcttgggaaaccccaccttattggtgaaacagtaaatatcggcggcgcagagcgtgcctcagtcttaaaggttgtctccctcattgaggatatttccggtagaaaagcaacactgcacttttcggacaaaatagcaggggaaccgagcaacacgtgggcggatatttcaaaagcaaaacagctcttgcattatgatcccgccacatccttaaaggatggcttgaccaacgaaatcgcctatttatcgtcgctgtatcagggggaataaaaatgaagcttgcctttatctgtacagaaaagctgccggcgcccgcagtacgcggcggcgctattcaaatgatgattgacggtgtcacgccctatttcagcagcaggtacaacctgaccattttttcaatagaagatccatcgctcccaaaaagagaaacaaaagacggcgtacattatatccatctgccaaaagaacattaccgcgaggcggtagccgaagagctgcgagcctcttcctttgacctcattcatgtgttcaacaggcctttaaatgtctctttatataaaaaagcctcaccaaacagcaagatcgttctgagcctgcataacgaaatgttttctgaaaaaaagatgaccttcgcgcaaggaaaagaagtactcgacaatgtctccatgatcacaacagtgagcgaatttattaaacaaaccgtcattgaacgtttccctgaagccgaggacatcacaaaagttgtgtattccggcgttgatttaaactcttatccgcccgtatggacgatgaaaggctcggctgtcagaaaaacataccggaaaaaatacggtattgaagataaaaaagttattttattcgccggccgcttaagcccgataaaaggacctcaccttctcattcacagcatgagaaggattttgcagcagcaccctgatgctgtactggtcatagcgggcgggaaatggttcagcgatgacagcgaaaaccaatatgtaacctatctgcgcacgctggcgctgccatacagagaccacataatctttacaaaattcattcccgcagacgacatcccaaacctttttctgatggcagatgtatttgtgtgcagctctcagtggaacgaacccctcgcccgtgtgaattatgaagcaatggcggccggcacgcccttaattaccacaaatcggggcggaaacggagaagtcgtaaaagacgaagtcaccggccttgtcatcgacagctacaacaaaccttcttcatttgcaaaagcaattgacagagcctttacagatcaagaattaatgaacaaaatgacaaaaagcgcccgaaagcatgtagaagctttatttacctttacccatgctgccaaaaggctcaatactgtttaccaatccgttctgaccccgaaaaacaaacaatttccgccgccttttctgacgcaaaattttgatttatcatctatcaatcagctttttgtgaaagcaaaaacataaaacctacagctcgtgttgcaaaacgggctgtttttttgctgcagaaaacataaaaaaaggcataaatgtgactttatgccttgcgctttacggtttgagaaaaccatggagctggtttagattcacttggaagaatgatgatttccactttagcttcttccgctaagtctggttcttcatcttcatcctcttcttcatatggggacactgagcgtttcgaatcacgctcctcctcaggctctagaatggtttcgaatttcgtttcttcttcatcatcgacgattttgtgatctgtttccttttccttcgtttcttcttgatattctttcggtgcattgatgtgagggagctctcgaatgctgcccacatctaaatgcttctcctcttcttccttctcagctgacattgagtcatgagcctgccaccccatcggcccaggcggtgtaaatacgaattggtcgagatccagtttagaaatagaggctttttgtctcgatgacctcatgtcaattcgcctcccgatacgcttttatctttttatacagttccggcagtttatccaaaaacgaatctttagattcttcaacagaaatcatgttttgcagcgcccagttatatttctcatctgaccacgttttcttttgcttcaaataatatttgtgcccgattgcacagaacaaatgcggaaacgcgagatcaatccaaagtacctcgtactgtttttctgtgagcggatacactgcgtcgtaggccgcaagcagtgcgaccatgaaatcagtatcccatacagaaagcttaaccatcactttattcagcagaatacgaaggtctcttgacggcaaatcgtaggtaatcgagtgaagctcctttaaaaaaggctccccttcgatctctgtcaaacgtgccaatgtaaaatcttgaaaacagaatccgccatgctcgagcgtttcttttgtccaggtttcgtattctgagtcatcaagcgcctgaagagcttcttttcctcttgccagcattttatcagcatgttttaagaaagtttgcgaaaatacgtcatcaggataggatgccgcgatctgcatattcccttcaagttcctgcagcttccatcggtacaatttatgccattttcccagcctgcttctcttcttgctttcatctgtgcaaacatatccttttgaggcatgatgaaaatggccggcaaatgacatgacttttttcatttgctctgcatcatagtaaatcatttcttttcctgtcactttgtcatataagctgtaagaaacctgatccgtgcccaagcagctcccgccattttttgtttgatgaatcggcgctatcggcagccctttctcttgtaaatgagcgtgtgcctgagtgataaaaagcatccgctccggtttcatttgcgcttcttttagcagctttgggccatgatcagtttcgacttcccagattttgcgcccgcttttgttcgatttcagcgccacatggtcgatatgaaacggataatagctgagaatttcggacacaatctgttcttcatgctctttttggtacactctgttcaccccttctatctgttcttttcatagacgctgagcagattttcagccaccctctgccagccaaaattgctttctgcctcacggcggctgtatttcccaagccgttcccgcttttcagagctgctcagcaaatcattgatacgttcggcatattgtttaggattttcaaagtcatgaatgatgtagccgtttttcccttcctctatgacctctggattgcctccccgattgcttgtgataattggaagtcccgcagccatcgcttcataatgcacccttgctaaaggctcctgccattgcgaagagcatacaaatacatctgacatggtataaaggcgcggaatgtcctttggcttcacaaattgaataaatgtgacatgatccttttgcatcgcaccaagggtatgaagatgtttgacatagttatttaattcattatctccgaaccattttgacccgataaacaccatcatgacatcggggtgctcctcaatgatgtccggcaaagcctgcaataatatgtgcgggcctttgactttgctaagccggccgacaaacaagacgatttttttgccgtgaagccccagctcgcttcgcatctcttcgcgagctcgctgcccttcattcgtccagcgagggtggtacgtttttaaatccacaccagaatacaccgtttttgtttttgatcgtgctgacggaaaacggcttgtgatcgtctgtccgatataatcgctgaccgtaacaatctgcgctacggagtcgatgcaaatctcgccttccgcctggctgattttatcgtaagcgaacatttcattgtgaacgcttaaaataaaaacagcatccggcgcctgtttcttcaatttcggaacccagcttgggcgattacaaacatgcacaagatcaaaacggctctttttcagctctgctccaacggcttcttcataacggtcttcatccaaatgcacataatggacaccgtctaccttctctctatcagcgagattcggatctttaatagaaaacacagtcacctcatgtttttttgcaattaaaggggcaaccgcttcgaggtagatttgaatggcgcctcctcgaaccgatgggacaggaagcttctctgtggcgatcagtgctattttcatacatagcctccattcctgcatgatttttaactagttagaatcatgatacggctgaacaaccaacttgtgcggaatgggactgccctaaaaacaaaacgggtaaacaaccagattcatctattaaatatagtcaaataactcaatcattttttccttttgattcataaggtaggagtaaaacaggtaaggatgtgtcctttaatggcagaaaaccatgaagtcattgaggaggggaattcatcagagcttcctttatcagcagaagatgcaaaaaaattaacggagctggctgaaaatgtgcttcaaggatgggatgtgcaggctgaaaaaatagacgtcattcagggaaaccagatggcgcttgtctggaaggtccacacagactccggcgcggtttgtctaaaacgaatacacaggccagaaaagaaagcgttgttttccattttcgcgcaggactatttagcaaaaaaaggcatgaatgttcctggcatactcccaaacaaaaaaggcagcctatattctaagcacggctcatttctatttgtcgtatatgactggatcgaaggaagaccgtttgagctgactgtaaagcaggacttggagtttatcatgaaaggccttgctgattttcatacagcttccgtcggatatcagccgccaaatggcgttcccatatttaccaaattaggtcgctggccgaatcactacacgaaacgatgcaaacagatggaaacgtggaagctgatggcggaggcggaaaaagaagatcctttctcacagctttatcttcaggagatagatggctttattgaagacgggctgcgcatcaaagaccggcttttgcaatcgacctatgttccatggactgaacagctgaaaaaaagccctaacctttgccaccaggattacggaaccgggaatacactcttaggagaaaatgaacagatttgggtcatcgacttagataccgtatcatttgatctgcctattcgcgatttgcgcaaaatgattattccgcttttggatacgacgggtgtttgggatgacgaaacatttcatgtcatgctgaacgcatacgaatccagagccccattaactgaagaacaaaaacaagtcatgtttattgatatgctgtttccttacgagctttacgatgtcattcgcgaaaaatacgtccgcaagtctgctttaccgaaggaagaattagaatcagcttttgaatatgaacgcattaaagcaaacgcattgcggcagcttatttaagaccatcatttcccccgcatatcgggggtttgatctttataagataaagggtaattaaatacatgcggaggttgcaaatatgaaaaagattgtcggcgctttagccgtttttgtgattacatatgcgctgttttcagccgcaggctacctgtttcctgtggaccaagaatggtacaattcattgaaaaaaccggactggacgccaagcggaactgcgatcggcatcatttgggccatcctgtttgccctgatctccctttcagcagccattgtatatgctgcgttttcatttaaaggtgcgaaaagcttttggtttacacttttgataaattacgtgctcaatcaagccttcagctatttccagtttacgcaaaaaaatctgctggctgcatcgcttgactgcctgcttgtcgccatcacagcaatcgtattactgatcattgccaaaaaatacagcagagccgcaagctatcttcttttgccttattttttatggagtgcatttgcgacgttcttatcctttacaatcaattcaatggatctgtgaacaaaaaaagccgcttatacagcggctttttcacatcatcggcttgatgccccaaatgtccttcgcatattcccggatcgtgcggtcgctggagaaatatcctgaatgagcaatgtttacaatcgaacgctcagaccatttccttcgctctcgataatcagcttgaattcgctcctgcgcatctgcatatgagctgaaatccttcagcacaaaatactcatcattatgcggaagcagcgagtcaaagatcgattcaaattcatctgcttctccttcaaaaaaaccattgatcagctgatccgctacctgcctgattcttctgtcatgctgataatattccctcgatctatagccaccattttcctgatacgatagaacctcatccgcctttaagccgaacgtgtaaatacagtcagggcccacccgctcaaagatctcgatatttgcgccgtcatgcgtgccgatcgtcaaagccccgttcatcataaacttcatattccctgtaccagacgcttccttgcttgcagttgaaatttgctcacttacgtctgatgccggaaaaattcgctcagccatagaaactctataattttctaaaaaaacaactttgatcagctgtttgactgccggatcataattgactttttctgcgacagaatggatcagcttaatgattttcttggcataataatagcttggtgaagcctttgccccgaaaataaaggtttgcgggtagattgaaaacccggcgtcctccttgaggcggttatacaaatacataatgtgaagaacattcagcagctgccgtttatatgcatgaagccgtttcacctgtacgtcgaatatgctgtcagggttcacaaccaccccggccgtgcaaaaaatcaaatcggcaagctcttgttttttcttgcttttgttgttttgaaactgttcaataaatgcaggatcagtggcgtacggttctaaacggatcagtgattccggctgtttgacccattcatcgccgatcgcctctgtaatgatggcagacaagcctggattcgcttttaacagccagcgcctgtgggcaattccattcgtcttattgttaaaacgattcggaaacagcaagtgaaagtcgcgcatctccctttccattaatatatcggaatgtatttttgcaacgccatttacactgtaactgcctactatggccagatgagccattttgacaacaccatgcgctgtaatcgccatgtcctctatccttttccagtctcccggatacttttcccaaactgcgcggcaaaacctctcattgatctcttcaataatcatgtacattcgcgggagcagcggcttaaacaaatgaatcggccatttctcgagcgcttctgacaatgttgtatgatttgtataagaaatcgtatgtacagtgatatgccaagcttcttcccagctcatgttctcttcatcgagcaaaatccgcatcagctcaggcaccgcaagcgcagggtgagtgtcattaatatgaatgctcacttttttatgcaggccggataaagatttatgtgtttttcggtaattgttcacaatgctttttaagcttgcgcatactaaaaaatactgctgcttcagccgtaaaattttcccctcatcatgggtgtcatcgggatataagaattcagaaaccgcctctgtttcccgcttataagacaaaatattaccgccgtgataatgcgcatagggctcggcgttccagagccttaacgtgttgacagtgcccgtttcatagccgatgaccgggatatcataaggaacagcggtaacaattgtcgcttgttcgtggcgaaaatgcaggcgcccgcttttttctgtcatatggacttcgccccaaaacggcacgtccactgcttgatccgcattccttacttcccatacgttcccgtttttcagccattgctcaggcagctccacctgatgcccgtctacaattttttgctcaaacaaaccatgcttataacgtatgcccatgccgtgcccaggcaggttcaacgaagcaagcgaatctaaaaagcaagcggccaagcgcccaagtccgccattgccgagacctgcatcgttctctatctgaaggatctcctctaaattgatgccgatttcctttaaaccagcttctacaacatcacgaacaccaagattcattaagttttgctcaaggagctgaccgagcagaaattcgattgataaataatatgtctgcttcccggaatttgatctgcttttttcattcgtttcgatccaatcagcgctgatatactctctgaccatattgcccaacgttttatattgatccagcttggcagaatctttaaagctttttccgcacgtcatttccagacgctttaaaaataagtctgcaaagcgttctttactcgagaacatcccgtccactccttgtcacctgctcgaaaatacgctgatactctttagccgacttcccccagctgtaatctgcattcatagcggtcttcacgatgctcttccatacatcctgttggcaataaaacgacagcgccctttctatcgtaaatttcagatcatgcgcattaaaggcggaaaacgtaaagccattgcccgttccctcttcctcctgataggcacggacagtgtcgtaaagaccgcccgtttccctgacaatcggaatggcgccatattgaagagcaatgagctgccccaaaccgcacggctcaaatttcgacggcatcaaaaacatatcagagcccgcataaatttgatgggctagcggctcatcaaacccgatataagcccggcacttctcatgaaaagcaaattctgcataccggaaataatcttcaaattcacgttctcctgtgcctagcacaaccagctgtatgtcttgctcctcaagaagttcgtgcataattctgcggacaagatcaagccccttttgtttagtgagccttgtcaccatactgatcagcggaatatcgtttttctctggaagccccatccgctgctgaagcttcgttttgttttccagcttgcatgcaagatcccctgaatcgtattgcgcctctatataagggtcgcttttcggctgatagaacgtatcatcaatgccatttaatatgccggttacatcatcttccctatattgcaaaacctgttccaactgctcaccataatacggcgtcatgatttcatttctgtaagtggggctcacagttgtcacatgatcagccgcaatgatgcccgctttcataaaattaacaaatccgttgcattctaacctttcataatgaaaatgatccatctcaagacccagcaagtcatgtgtgacatcaggagggaatatgccttgaaactgcaggttgtggatcgtgagcacgcttttcatccgttcataaaaaggatgttttctgtactcctctttcagcaaataattgaccatcgctgtatgccaatcgtgagtatgaacaatatcggctggaacattcacaactttggcagcctccagcacagctcttgaaaaaaaggcaaaccgctcaccgtcatcataatgcccgtacaacgaatccctgttgaaatagtactcattgtcgatgaagtaataattcacatcgtcttcggccatatgttcaattccgcaatattgctgacgccagccgacagctaccgtacactcagccttttttttcatacgctttttccacggttcaggtatttggctgtacttcggcagcatcacatatacttcattgcctaatcgcgcaagcgccttcggaagagcgcctgctacatcggcaagacctcctgatttcacaaatggggtgcattcagacacagcaaataatatcttcaagaattcatcagctctccttgcaccaaaccttttcttaatacaagcggctgctcagctgttcctacagcttccgtcgccttgccgattttaacgtccttatccgaaatgacctgctcaagaagacaatcctcgccaatctgcgttttttgcataataatacagtttttcagcttcgtaccctttccgacatggaccgccctgaacaaaatgcagttttcaacctctccttcaagcacacagccgtttgccaccaaagaatttttgacagtgctgtgctttccgtatttcgtaggcggctcatccttcacttttgtatagataggctgctgcggcaaaaacacctgctgccaaaaacgaggctgaatgagctccatactgtgggtataatatttttccaccgaatcaatgacagcagcataacctgaatattcataagggcaaatggtcagggcggaagattccttttcaacagcctcctgaatggttttatagcctttttcgctatgtccgtagatcagatcctttaaaagcgttgttgacatgatatagatttgcagcgactggccgtcctgaaatacctcggtgacgtcgcagccaacctcctgatggcgtttcagcacatattgaaattgaatgttgcatacggtatggctgttggagattacagcatattgctgagtgcttctgtggaagtaatctagatggtccgaaaactggcgaaaggaaccgaattcatcgtattcgtgatgaagatggggagacgggaaaaaaaagaggccgtcctttttccggtgcaaatcccattccttacccgccccaaggtgatccatgagcgaacggtaacgatacttcggaaaaattgcaacactcctaatatccgcattcaccatgttggaaagcataaaatcaatcagtcggtacctgccggcaaaagggatcgccccgagcgaccgctttgctgttaaatcctgaagagaatgcttatatgtggtttcatctataacacctaacatttgattattgaacactgactctgccccctcttcagtaattaaatcaattctttttctacaaattcctctgaaacgagcagcacctcttcaatgtctttttcggagcgaatcactgcgccatccggcagcaccatcccattaggaacaatggcattttcaatgactacatgctccccaatcgtcacatccggcattatgacggatgatgtaacagtcgtatgcttaccaacagtcacaccttgaaaaagaacggagtgagacacatttccatatacaacacaaccttcgttcacaagcgaatcttgaacctgcgcatcagatgaaataaattgcggaggctgatttggattgacggagtaaattttccatttgcgttcaaacagcttcagctccgagtcctcttttaacaaatccatattggcttcccacaagctctgcaccgttccgacatccttccaatatcccttgaacggataagcagaaagcttctttttctcttccaaaagcagaggaataatgtctttgccgaagtcgtggctagaataagggttttgatcgtccatctcaagatactgtttcaaaagcggccaattgaatatataaattcccattgaggcaagattgctcttagggaatttgggcttttcatcaaaatgtgtgatcgtcccatctggattggccttcatgatgccgaaccggcttgcttcctccaagcccacttcgatgacagagatggtcacatctgctttcttttcaatgtgataatcaagcattttgccgtagtccattttgtatatgtgatctcctgataaaatcagtacatactcaggatcatactgattcaaataattgagattttcataaatggcgcttgccgtccctttataccacttgacttctgatgactcggcataagggggtaaaaccgtcacgccaccattatatctatccaggtcccatgcactgccgatcccaatataggaattcagctcaagcggctgatattgcgttaaaatcccgactgtgtctatgcctgaatttgaacagttgcttagggtaaaatcaataatcctgtatttacccccgaaagatacagccggtttagccatattttttgttaatccgctgagacggctgcccttcccgccggcaaggagcatggctacacattgttttttcatctttttatctctcctctttttttaaccgcccgtaaaatcgagatgccgtaaggggggatggtcatcgtgatataacacggtttatgatgaagtgctccctttttagccgataatggctttttgttgatttgccctgagcctccatatgtttcactgtcactgttaagcacttcaatgtattgagtaaaaaaaggaactccaacatcatattgatgatagaccacgggtgtaaaattacaaatgatgacaagcgcctcaccgtgctttttgccataacgaataaaagaaaagattgattgttcgtcattatggacatcaatccattcaaacgattgtgcacgatggtcatgctcataaaggattttgcttttttggtaaaagcggagaagatcttgcgtaaaaacgctggctttctgatgcatggggaaggagtccaaaaaccaatcaagctgttctgtatctttccattcatcaaattgggcaaactctgatcccataaagatcaatttctttccgggatgcactgtcatatagcccagcaaaagccgatactgggcaaatttctgccagtagtcgccaggcattttattaagaagtgatttttttccgtatacgacttcatcatgagaaaacggcaatacaaaatgttcactaaacgcatatagtaatgaaaaagagataagctgatgacaatgccgcctttcttcgggcggcgtctccatgtatttcagtacgtcattcatccatcccatattccatttataatgaaaaccaagccccccttcctcaacggcacctgtcacttgaggccattctgtagaatcttccgcaatcatcatcacatggggatatgcctctctcatggtttgattgagtttttttaaaaactcaacagcatatggattcgtgtggcgttcatcctgatttggccaatacaagatattagccactgcatcaaccctaaatccatctatatgatagaattccgcccagtacaacgcattcgaaattaaaaaactatgaacttccggttttcccaggtcaaagtttgccgtgccccataaccagttctcccgatcacgttcttctttgtattcataaagcggttctccatcaaacatatagagtccatgtgcatctttacaaaaatgtccggggacccaatccaaaatgactccgatattttgttgatgacattcatcaacaaacttcatcagatcatgcggcgggccaaacctgcttgtcgggctgtaataccccgttccttggtacccccatgaacgatcatatggatgctcatacaccggaagcagttcaacatgggtaaacccatgctccttgatataagggataagcgtctgacttaattctttataggaataatgcctgccatcagaatgcttcttccaagacccaagatgcagttcataaatgaaaacaggtttttcatacagcgtcttagtcttctgtttcttttgccatttttgatcttgccagctgtacccttccaaatcgtaagtaagtgacgctgtgtttggtctgacttctgaataaatagcgtatggatctgccttcagcctgatctcaccgttattcgtcacgatttcatatttatatcgttccttttctcctaaacctggaataaataacgtccaaataccactatcattcactctgtgcatcacatgctcttctccagaccagctgttaaaatctccagccactcgtacttccgacgcatgaggcgcccacacacagaattcatatccgcttttgccattcagctcgcggtaatgcgagccaaacagctgatagctttcaaacagactgccttcgtgaaaaagataaacatcatgtgctgtcgggctggcagcggccatgtaatcatcctttctgacatcatagttttcatttatagtatttattcgaagaaataaaaaaaagccctttgctgaaagcgcttatacttatagacaattaacttcattttctgaagaaaaacgaaatatatggagatttttgtagtctgcttttaaaataaagaacaaaatctaagacatatcatgatttagaaaacaaaaaaaccttgcaggatatgcaaggcttctggatgacccgtacgggattcgaacccgtgttaccgccgtgaaagggcggtgtcttaaccgcttgaccaacgggccgataattattatacctgtaatcatatggcggagaaggagggatttgaaccctcgcgccgcttacacgacctacacccttagcaggggcgcctcttcagccacttgagtacttctccatttggctccacaggcaggattcgaacctgcgaccgatcggttaacagccgatagctctaccactgagctactgtggaatacaaaagtcatggtgggcctgaatggactcgaaccatcgacctcacgcttatcaggcgtgcgctctaaccagctgagctacaggcccatgacgatatagaaatggagcgggtgatgggaatcgaacccacgacatcagcttggaaggctgaggttttaccactaaactacacccgcaatttttatttggggcgattgatgggaatcgaacccacgaatgccagagccacaatctggtgcgttaaccacttcgccacaaccgccaaaatatattgataaatggtggctcgggacggaatcgaaccgccgacacacggattttcagtccgttgctctaccaactgagctaccgagcctaagtatttaaatggcggtccggacgggactcgaacccgcgacctcctgcgtgacaggcaggcattctaaccaactgaactaccggaccattttaaaatttggttgcgggggcaggatttgaacctgcgaccttcgggttatgagcccgacgagctaccgaactgctccaccccgcgatgattaggaatatgtatggcggaggaagagggattcgaacccccgcgggctttgacacccctgtcggttttcaagaccgatcccttcagccagacttgggtattcctccgtatagtggtggaccttgtaggactcgaacctacgaccggacggttatgagccgtctgctctaaccaactgagctaaaggtccattggtagcggcggaggggatcgaacccccgacctcacgggtatgaaccgtacgctctagccagctgagctacaccgccaaatatttttagaaatcaagtggagcctagcgggatcgaaccgctgacctcctgcgtgcaaagcaggcgctctcccagctgagctaaggccccaagaatggtcgggaagacaggattcgaacctgcgaccccatggtcccaaaccatgtgctctaccaagctgagctacttcccgatttcatatagatcatggcgcgcccgagaggagtcgaacccctaaccttttgatccgtagtcaaacgctctatccaattgagctacgggcgcaaaacttaatgccgagggccggacttgaaccggcacggtagtcacctaccgcaggattttaagtcctgtgtgtctgccaattccaccaccccggcgtggatggtatagttggagcggaagacgggattcgaacccgcgacccccaccttggcaaggtggtgttctaccactgaactacttccgcagaaatggtgcggatgaagggacttgaacccccacgtctgtaaagacactagagcctgattctagcgcgtctgccaattccgccacatccgcaacatgtaaatggtgagccatgaaggactcgaaccttcgaccctctgattaaaagtcagatgctctaccaactgagctaatggctcttcttacaagagacttgaatattatatcatataaaagtggtgccggcaagaggacttgaacccccaacctactgattacaagtcagttgctctaccaattgagctacaccggcatatatgtaaaaccgatatgtataatgaaaaatggtggaggatgacgggctcgaaccgccgaccctctgcttgtaaggcagatgctctcccagctgagctaatcctccatacttgcactaacgtgcaattgcttggcggcgtcctactctcacagggggacccccccgactaccatcggcgctgaagagcttaacttccgtgttcggtatgggaacgggtgtgacctcttcgctatcgccaccaaacaaattgagagtgttctctcaaaactagataacaggtgtgacatcattcaaaaatatggttaagtcctcgatcgattagtatctgtcagctccatgtgtcgccacacttccacctcagacctatcaacctgatcatctttcagggatcttacttccttgcggaatgggaaatctcatcttgagggggcttcatgcttagatgctttcagcacttatcccgtccgcacatagctacccagcgatgcccttggcagaacaactggtacaccagcggtgcgtccatcccggtcctctcgtactaaggacagctcctctcaaatttcctgcgcccgcgacggatagggaccgaactgtctcacgacgttctgaacccagctcgcgtaccgctttaatgggcgaacagcccaacccttgggaccgactacagccccaggatgcgatgagccgacatcgaggtgccaaacctccccgtcgatgtggactcttgggggagataagcctgttatccccggggtagcttttatccgttgagcgatggcccttccatgcggaaccaccggatcactaagcccgactttcgtccctgctcgacttgtaggtctcgcagtcaagctcccttgtgcctttacactctgcgaatgatttccaaccattctgagggaacctttgggcgcctccgttaccttttaggaggcgaccgccccagtcaaactgcccacctgacactgtctccccgcccgataagggcggcgggttagaaggtcaatacagccagggtagtatcccaccgatgcctccaccgaagctggcgctccggtttccaaggctcctacctatcctgtacaagctgtaccaacattcaatatcaggctgcagtaaagctccacggggtctttccgtcctgtcgcgggtaacctgcatcttcacaggtactataatttcaccgagtctctcgttgagacagtgcccagatcgttgcgcctttcgtgcgggtcggaacttacccgacaaggaatttcgctaccttaggaccgttatagttacggccgccgtttactggggcttcaattcgcaccttcgcttacgctaagcgctcctcttaaccttccagcaccgggcaggcgtcagcccctatacttcgccttacggcttcgcagagacctgtgtttttgctaaacagtcgcctgggcctattcactgcggctctctcgggcttgcaccctaacagagcaccccttctcccgaagttacggggtcattttgccgagttccttaacgagagttctctcgatcaccttaggattctctcctcgcctacctgtgtcggtttgcggtacgggcacctctcacctcgctagaggcttttcttggcagtgtggaatcaggaacttcgctactatatttcgctcgccatcacagctcagccttatgggaaacggatttgcctatttcccagcctaactgcttggacgcggatatccaataccgcgcttaccctatcctcctgcgtccccccattgctcaaatggtgaggaggtggtacaggaatatcaacctgttgtccatcgcctacgcctttcggcctcggcttaggtcccgactaaccctgagcggacgagccttcctcaggaaaccttaggcattcggtggaggggattctcacccctctttcgctactcataccggcattctcacttctaagcgctccaccagtccttccggtctggcttcacagcccttagaacgctctcctaccactgttcgaagaacagtccgcagcttcggtgatacgtttagccccggtacattttcggcgcagagtcactcgaccagtgagctattacgcactctttaaatggtggctgcttctaagccaacatcctggttgtctaagcaactccacatccttttccacttaacgtatactttgggaccttagctggcggtctgggctgtttccctttcgactacggatcttatcactcgcagtctgactcccaaggataagtcattggcattcggagtttgactgaattcggtaacccggtaggggcccctagtccaatcagtgctctacctccaagactcttaccttgaggctagccctaaagctatttcggagagaaccagctatctccaggttcgattggcatttcacccctacccacacctcatccccgcacttttcaacgtgcgtgggttcgggcctccattcagtgttacctgaacttcaccctggacatgggtagatcacctggtttcgggtctacgaccacgtactcatgcgccctattcagactcgctttcgctgcggctccgcatcttctgcttaaccttgcacgggatcgtaactcgccggttcattctacaaaaggcacgccatcacccgttaacgggctctgactacttgtaggcacacggtttcaggatctctttcactccccttccggggtgcttttcacctttccctcacggtactggttcactatcggtcactagggagtatttagccttgggagatggtcctcccggattccgacggaatttcacgtgttccgccgtactcaggatccactcaggagagaacgaagttttgactacagggctgttacctcctatggcgggcctttccagacctcttcatctacctcgttcctttgtaactccgtacagagtgtcctacaaccccaagaggcaagcctcttggtttgggctaatcccgtttcgctcgccgctactcagggaatcgcatttgctttctcttcctccgggtacttagatgtttcagttccccgggtctgccttctcatatcctatgaattcagatatggataccactccattacgagtggtgggtttccccattcggaaatctccggatcaaagcttgcttacagctccccgaagcatatcggtgttcgtcccgtccttcatcggctcctagtgccaaggcatccaccgtgcgccctttctaacttaaccgttaaaaagaatcactatgtgatatcttgtattactaattgaatgtgatgtctactgttatctagttttcaaagaacacgtttcgaaggaatgatccttcaaaactaaacaagacagggaacgttctgtttataagacccaaggtcttatattccgtataatatccttagaaaggaggtgatccagccgcaccttccgatacggctaccttgttacgacttcaccccaatcatctgtcccaccttcggcggctggctcctaaaaggttacctcaccgacttcgggtgttacaaactctcgtggtgtgacgggcggtgtgtacaaggcccgggaacgtattcaccgcggcatgctgatccgcgattactagcgattccagcttcacgcagtcgagttgcagactgcgatccgaactgagaacagatttgtgggattggcttaacctcgcggtttcgctgccctttgttctgtccattgtagcacgtgtgtagcccaggtcataaggggcatgatgatttgacgtcatccccaccttcctccggtttgtcaccggcagtcaccttagagtgcccaactgaatgctggcaactaagatcaagggttgcgctcgttgcgggacttaacccaacatctcacgacacgagctgacgacaaccatgcaccacctgtcactctgcccccgaaggggacgtcctatctctaggattgtcagaggatgtcaagacctggtaaggttcttcgcgttgcttcgaattaaaccacatgctccaccgcttgtgcgggcccccgtcaattcctttgagtttcagtcttgcgaccgtactccccaggcggagtgcttaatgcgttagctgcagcactaagggcggaaaccccctaacacttagcactcatcgtttacggcgtggactaccagggtatctaatcctgttcgctccccacgctttcgctcctcagcgtcagttacagaccagagagtcgccttcgccactggtgttcctccacatctctacgcatttcaccgctacacgtggaattccactctcctcttctgcactcaagttccccagtttccaatgaccctccccggttgagccgggggctttcacatcagacttaagaaaccgcctgcgagccctttacgcccaataattccggacaacgcttgccacctacgtattaccgcggctgctggcacgtagttagccgtggctttctggttaggtaccgtcaaggtaccgccctattcgaacggtacttgttcttccctaacaacagagctttacgatccgaaaaccttcatcactcacgcggcgttgctccgtcagactttcgtccattgcggaagattccctactgctgcctcccgtaggagtctgggccgtgtctcagtcccagtgtggccgatcaccctctcaggtcggctacgcatcgttgccttggtgagccgttacctcaccaactagctaatgcgccgcgggtccatctgtaagtggtagccgaagccaccttttatgtttgaaccatgcggttcaaacaaccatccggtattagccccggtttcccggagttatcccagtcttacaggcaggttacccacgtgttactcacccgtccgccgctaacatcagggagcaagctcccatctgtccgctcgacttgcatgtattaggcacgccgccagcgttcgtcctgagccaggatcaaactctccgataaatggatcacaggttaagttcaccgcatcctgcggcgacacctgtgtgacctgcgtcgtgcagaccctagtttgactgactacgcacatcgctgtgcgatttttaaaaactgaattaacaggtacgttttgtcttgtttagttttcaaagatcatttcgttacttctcaatgaagcagctttactaatataacattcagcttcttttttgtcaacaacttttttcaagttgttttgaagcatctagtttgtgtccgctgtgcatcagcgacgtttaataatataacacctgtatttatttattgcaatagtttttttaaaaaaatctataaaacaaataaactataatcctcgccatgatttctaaagcgtgtgtatcatataagtttcttaaaagaacatatacatcagtcatgtgatcttgttgtttttttcgttttcttgtatagtagaaacgaactaaatactgatgaccacaaggggagcattaaagctgagagtgagcggtttcgttctgaccctttgaacctgttagttaacgctggcgtagggatgtggcaaagtcaaatgaattgcagatcgtaaagcagtgcgtggaacttttctcatccttccgcgtgctgcttttttgttgtccttttggttgtctgtcaatggaaggagatagatatgaatcaatctaagcaactggttcgccttattgaaattgccattatgacagcggcagccgttattttagacattgtctcaggaatgtttcttagcatgcctcaaggaggctcggtctccatcatgatgattccgatctttttaatttcgtttcgctggggtgtcaaagcaggtcttactacaggtttgttgacaggtctagtacaaatagcaatcggaaacttgtttgctcaacatcctgtacagctattgttagattacattgtcgctttcgcagcaatcggcataagcggctgtttcgcttcttctgtccgtaaagccgctgtatcaaaaacaaaagggaaattgattgtttcagtggtcagcgcagtttttatcggcagtttgctgcgctatgccgcgcatgtcatttcaggagctgtgtttttcggcagctttgctccaaaaggaacaccggtatggatttattctttaacttataatgcgacttacatggttccttcattcattatttgtgcaattgtcctatgtttattatttatgacagcaccccgtttgcttaaaagtgacaaagcgtaaaagtaacaatcccccagcgaattccgctgagggattgttcgttatctgttaagaagtgtttttaaagctgaaagatccggccagccaagacctacttctttcagccttactccggcaatttcaaagttgtcctccgctactctttcaggtgaataggcctgataaaatataattgagggattctgctcaataacccaaacaaacatacttgaaaatccatgttgaagcaaaaactccgctccttttgctaagagcgccctgcctgcaccttgccgctggcgctcttccagaagataaatagcgtataactcgccgtcatagccttcttgttcagagcgaataggtccaaatgaagcaaagccgaatactgaatccatttcgtcctgagcaacaaatactccttttaacgagcgacttttccatttgtcttcaaattccttatagttcaggctgtttaaataatcaatcgggataatttcgtggtatgttgtcctccagctgtctacatgcacttttgcaataccctttatatcctctaacttcgcttcacgtacagttaccatacggttctgtcctttccttactctgatttttggaccgttttggcttctttgatttcatttgttaattcattgatgctttgttttacgtttccttttcctgaaaagttctcaagcatttcttttacatcgattcccgaggatgcttttaaactttcttgcagacttgacattaagttcgtcgcatagctggttactttgtttgctccgcttgattcaccgcttcctcctgtatcgacaacggtgattttatcaatatttgaaagaggtgccgctgcttgtttcgcgtattccggaagcattttgacaatcatatcgaaaatcgccgcctgcccgtactgttcaaaggcggccgcaattttctcttttgcttccgcttctgcaagacctttcaggcggataacctctgcttctgtctctcctttcgctttttccgcttctgcttttgctagcccgtcaattcttactttttccgcctcagcctttgccattgcttcaatactgtacttcttggcatcggcttccgcgagctgtttggctttctcagctgctgcggactgctcaacagaataacggtctgcatcggcttttttctttacctctgagtcgtattgacgttcacggcgaagaatttctttttcttctagttctatttgtttttggcgttcgataattttaacctgcatttcctgctctgtgacttgctggcgcgctcgggcagtctctaaatcatatgcttggtcggcattcgcttttgccgtatcttgttctctgcggaattcagccattttgagctgattgattttttcagcttcagcgatttccgtcgcccgttcaagttctgatttttttgcgtctttatcggcttctgcccgcttaattcgggtttctttatcagcctctgctgttgcgatatcagcatcgcgttttacttgggcaattctcggtttccctaatgattcaagataaccgtttttatcacgaacatctttaatggtaaacgagacgattacaagtcccattttcgcgagatcctgtgaagcgacacgctgcacctcttgagagaatttttctctgtttttatagatttcttctactgtcattgagccgagaatggaacgaaggtggccttctaaaacctcccgcgcttcctgctcacggtcgtcttttgatttccctaaaaattgttcggccgctgtagcgatttctcctatagaaccgccgattttaataatcgcagttccatcggccattactggcactccttgttctgtatagacttcaggtgtcgaaacatcgagtttgcttgataataggcttagcggctctgcctgctggaagacgggaaggacaaaggttcctccgccgcggacgattttaatacggttgccgccttcatcgacatgaacatttttattacccagatagctccctgttacaattaacgcttcatcaggccctgctgtacgatacttcgtaataaacacagctattagtgcaattaataaaaagaatacaactccgatgatcattataatcggcattgtcatatcaaattcctccttttatgttaaatgggttcatgcggagtaaccgaaagaactccgtttttgacatctacgactagcactcttgtgccataaccgatctgttgattttcaaagctgatcgctgacttcgagatggtgccgcctatcccttcaatgaccacttcaccaaacccgtcaacaggaacagctgtaatcactttaccgagtcttcctctgagatcatcttctctatatgccaatgattcttctgcagatgataatggtaccagtacaaagatgtgaagcaataccaccagcatgatcgaaaggatgcaagataaaagcgcaatcagcaagcttgacagaggcaatacgagttcacctatatatccgtccgctgaaaaacatgtgaaaaatgagagcactaatgtcggattaagaaacggaatgccttctggcagccctgcaaatacatctccgaaaaacagaaataacagcgtaaggctgcccgcaataataagcgtataaagataaattgtttgtataggtactccaaataactccaatttcctcatcctttcttcatcaatgcattgatgaacggctgccgttaccattaatacgagacaccccgggaaaagtttcaaaattttaagataagtaacccatttgaagtgctttataaatgataattgcttatatatatggtaatgtcattttaggaggagatatgatgagtatctttaatgaagccagattagaaacgtggaacgaattgaaaggactttctgacgaaaagctgaatcaaaagccttctgctgaagaatggagcatacgggaagttcttgaccatttgaaaaaaatcgatatgaccgcacaaaaaatgttgaaggaacgtgtacaggacgctccgattaaagaaattgaagaaaaaccgcttgaggtagcacaggacagaaataataaacggaaagccccgagtcatcttgagcctgcgcatgattttatttcaggcagccaaatgaaacgtgagcttgatgtggtaagagagcagctgactgctgcgattgcctctctgaaagaagaagattttgaaagagtgcttccgcatcctgtgtttcaagagctgactgtcagacagtggatcgattttatcggccatcatgaaaaacggcacctcagccaaatgaaagaaattaaagaaaagatagaaagggcctgatttaatcagaccctttctgcttttcgtttgacttttcgctgataggaatgaacttctatttcatcacctgtgtaaacagcaccaggtctctccacaatacagacaacccctctaatgcccagtgcgtggcggacgaaagccggcgccagcttcggttggtccggataataagactgaatgacttctcccggctggatacacggatcattttcgccctcacacagcagagccgctccgctcggaaaaataatccggcttccttcttttaatgaagtaagatctggcataccgctgactgccacattcgccccgagccattccggcaaaattctcggcactcccatttttaaagcgatttcgttgcattcctctattgaaacaattgaaatttgtctgcggttgaaaatttcagtccctcttgaaaacattggttctctggctcccgcttttttggtcaggccaaaatgcaagtcgccggggatgccgccataatcaaaatcaagcttgtccatttgctttgttacgaagctttctgtatctgcgatatataagccttccgcttttgcagtcatacgcttccacatcagctggcaccttccttcttatctaaaatttccgcctatgcttcattatcccaaaaaatcccgctctgtaaaggagcgggattttgattataccgttttaggcgtaaggttaaagcagcgcttgtagatccagttgtatgctttttcatttaaatctctagggtttccgaaggtttgcggatctttcattgcttctttagacaagcgttcgatcatatcaggtgatactccctgctcttctaaagtcagcacttctaaatcttcgaccagatcatacatccaattgacagatgctttcgcagcttcttctgttgtcatcttgcttgtatcaataccgaacgctttcgcaatacgcgcaaacttctcaggatagcccttccagttgtattccatgacagggcccatcatcgccgctacacattggccgtgagcgactgggataataccgccaagcgtttggctcatcgcatgagccgcgcccgctgattcacttccgtaagaaaggccggcaagcatcgctgcctgcgccattccgtaccttgcttccagatcctctccgtcagcaaatgccctcttaatgtaatgagcggcatactcaatcgccattagggcaaccgcatccgtgattggctgtgcaaatttcattgtatagcactcaatggcatgggcgagcgcatcaattcccgtcatagctgttacatgcggaggcattgaaacatgaagctcaggatcaatgatggtcaagtgcgctgcaatcagcggaccgcccgtgttgaatttgaattctctttcttcatctgtgataaccgcccattgggttacttctgatcctgttccagctgtagtgggaattgtcgtcagcggaggaatgcggttttccagcggttttttcccatctgccgcttcataatcaagcacgcttccttcgtgagtcgcttctactccgattgcttttgctgtatccatggagcttccgcctccgactgccaccaaaccattacagttctcttttttgtaaagctcagatccttcattcaccagacggacaggcgggtttggctcaactttattaaagagcaccacttcaatgcctgcttctttaagtgattcgattacaggatcagcaacaccggctttataaatccctgggtctgtgacaaggagcgcttttgaaacgcccagtgcagctacttcctcacccgtatgcttgatggctccgattccatgcttaatcacagtcggaatttcaaatgtgtggaatttctgcatgctttctaccttcatatttaatgtcatcatcaatctccccctcttatgaattgaaccagttaaccgctgccggttttgtattacggtatacatgtttgacttctgtgtattcttcaaggcctatttttccaagctcgcgtccgaacccggattgcttatatccgccccatggcgcttgtgcaaagtacggatgaaaatcgttgatccaaacggttcccattctcaagcgggctgctacccgttcgcacttttcaatgtcttttgaccataccgctccagccaagccatagatggtatcattcgcaagctcgattacctcttcttcagagctgaaggtttcgactgtcaatacaggaccgaaaacctcttcctgaacgattctcatgtcagaattacagtttgagaaaatagtaggttcatagaaaaagccgttttgaagctcaggatcttccgggcgtttgcctcctgtctccagcttcgcgccttcctctattccgatctcaacatatttttctacctttgccctgtgctccgccgaaataagcggaccgctttctgtctcagcatgaaaaccgtttccgagttttatgcgttttgcccgtttgaccagctccgccaaaaattgatcatgaatggcatcctcaacaagcaagcgggaacctgcagagcatacttggccggcgtggaaaaatacagcgtttaaggcctgatcaaccgcaacttctaaatccgcgtccttgaaaacaatatttgggtttttcccgccaagttcaagggcgatttttttgacgtttccgcttgccgcccgcatgatttttttgcctgtttcaattccgcccgtaaacgaaatcaaatcgacgtctttgtttacggcaagctcgtcgcccactgtggctcccggtccaaggacaagatttgcgacaccttttggtacaccggcttcttccatcagcttaaagactttgattgtcgtcagcggcgtaatctcactcggcttcatgacgattgtgtttcctgcagccagtgcaggggcgattttccagctcgcttgaaggagcggataattccatggagtgatctggccgcaaaccccgattggctctctaataattttgctttctgaatcaggaatcggagatgaaatgatctctcctccatctttgtctgccaagccggcgtaatattgaaaaacattggcgatatcgtccatatcggccttgctttcttcgagtgtttttcctgtatcaagagattcaagctcagccagctcctcaagatcgcgtctgattaattccgcaattttcagaacaatttttccgcgttcaagcccggatagcgatgaccattctcctttgtcaaatgctctgcgtgcggctgcgattgctttgatggcgtcctctcgccctccctcgcttacagttgcaatttcttcttgattaaatggattgataatactgcggatctgttctttttcggcactgatccattctccgtcaatgaataatgtttgactcatataagcctccttgacgtaaataaagtttgttaaataaaaatttaatgtttttaacaaccttaatctaacatatggtttttaaactgtcaaagtcccattttgatttttctttttgacttttcctcatgtttcgttaagataaagaacataaagaaataacttaacgaatttaattttctaaaggaaaagagggtcagtatggatgaaaatccagaatttgcagctatagaacaggctcgggatcttgttattgactccattgctgaaacgatggatctttacggaattacccgcagtgtcgggattttatatgggacgatgtatatgagggatgagatgacgcttgacgaaatgcgtgaggagttgcaaatgagcaaaccaagcatgagcacaggcgtcaaaaagcttcaagacttaaatgtagtgaaaaaaacatttcaccggggcatccgtaagcatacatttgtggctgagaaggatttctttaaatttttcacaaatttctttccacctaaatgggagcgggaggttcaagtgaatgtagcagcgatcgaggaagctcaagctgatttacaaaaggttttatgcaaggaagatctcgatgaggatatcaaaaatgaagcactgcagttatatgatcagctggaaagctctaaagcttactatgactggctgaaacggcttgctgaatcggtgcagaccggagaaatttttaaatttataccgatcgaaacaaagtaaagcagaaaacgcctgggaaagcaggcgtttttttgatgtaactactacaaatttgaaaaatacgggaaaaacaccccatttacttccaaaatatttgatggtaattttatgtaggtaaaatttgtatttggcctttcagaggaggtgaaaagcgggcaggcctgtttaatttatcattttttagggggaattttgttatgaaacgcaaattattatcttctttggcaattagtgcattaagtctcgggttactcgtttctgcacctacagcttctttcgcggctgaatctacatcaactaaagctcatactgaatctactatgagaacacagtctacagcttcattgttcgcaacaatcactggcgccagcaaaacggaatggtctttctcagatatcgaattgacttaccgtccaaacacgcttctcagccttggcgttatggagtttacattgccaagcggatttactgcaaacacgaaagacacattgaacggaaatgccttgcgtacaacacagatcctcaataacgggaaaacagtaagagttcctttggcacttgatttgttaggagctggcgaatttaaattaaaactgaataacaaaacacttcctgccgcaggtacatatactttccgtgcagagaataaatcattaagcatcggaaataaattttacgcagaagccagcattgacgtggctaagcgcagcactcctccgactcagccttgcggttgcaactaatgtaaaagaccggttaacgccggtcttttttgcgttttaccctcccctttttctctaattcccgttatcttttttctggtttaaaatttaaattgacaaacactagaaacaggagtaaattcttgagtgttcaatttcatacagtctcttttaccgcttaatcaaacacgaacgggggaaccaacgattggctgttttattaacagccttggggtgaatcttactaagtaagagggggtactctgaatccctaatccgacagctaacctcgtaggcgtatacagagaggaggtctattatttggccattctttgcaatggtcttttttgcttcagaaacgttaattcactaagggagatatgaacattgggaagaattaaaaataagcaatttgccgtgatcggtctgggccggtttggcggcagcatttgtaaagaacttcatagaatggggcatgaggtccttgcggttgatatcaacgaagaaaaggtcaatgcatatgcttcttacgccactcatgcggtaattgccaacgccaccgaagaaaacgaattgctttcattaggaatacgcaattttgaatatgtgattgttgccatcggagcaaatattcaagcgagtacgctgaccaccctattattaaaggagcttgatattccaaatatttgggtgaaggctcaaaactattatcatcacaaggtgcttgaaaaaatcggcgctgaccggattattcatcctgaaaaagatatgggagttaaaatcgcacaaagcctttcagacgaaaatgttttgaattacattgatctatctgatgaatacagtattgtcgagctgctggctacgcgcaagcttgattcaaaatcgattattgacctgaatgtaagagcaaagtacggctgcacgatcctggccatcaaacatcatggagatatctgtctttcccccgcgcctgaagacatcattcacgagcaagattgcctggtgatcatgggccacaaaaaggatattaaacgttttgaaaacgaagggatgtagacaaaggtgacacttcaaaaggataaagtgatcaaatgggttcggtttacaccgcctcaagtgcttgccattggttttttccttaccattatcatcggggctgtcctattaatgcttccgatttccactacgaagccattgtcatggatagatgctctttttactgcggcttccgctacaactgttacagggcttgctgttgtcgataccggtactcaatttacggtattcgggcaaacagttattatggggctgattcagattggcgggcttggatttatgacgtttgcggtcttgatcgtcatgatattaggaaaaaaaatcggattaaaagaacgaatgctcgtccaggaagccttaaaccagccgacaatcggcggtgtcattggccttgtcaaagtcctgtttctgttttcgatcagtattgaattgatagcagcactcattttatccatccggcttgtacctcagtacggctggtcatccggcttgtttgcaagtttgtttcacgcaatatctgcttttaacaatgccgggttttcgttgtggcctgataatttgatgagctacgttggcgatcctacagtaaacctcgtgattactttcttatttattacaggagggatcggatttacggttctgtttgatgtgatgaaaaatcggcgttttaaagctttttctttacatacaaagctcatgcttacaggaacgctgatgttgaatgcgattgctatgcttacggtctttattttagaatacagcaaccccggcacgctcggccacctgcatatagtcgataaactgtgggcgtcctattttcaggcagtgacgccgagaaccgcaggcttcaattctctagattttggaagcatgagagaaggaacaattgtatttactttattattgatgtttatcggagcaggaagcgcatcaacggcgagcggcattaagctgactacgttcatcgtgattttaacatctgttattgcttacttgagaggtaaaaaagaaacggttattttccgccgttccatcaaatatccgattatcattaaagctttagctgtgagcgtcaccagtttgttcatcgtgtttttagggattttcgccctgacgatcacagaacaagcgccatttcttcaaattgtgtttgaaaccttttccgcattcggaactgtcggccttacgatggggcttactcctgaactgacaacagctggcaagtgtatcattattgtcatcatgtttatcggaagaattggtcctttaacgttcgtgttttcattcgcaaaaacagagcaatcaaatatccgttaccctgatggcgaagtgtttacagggtgatatcaaaaaaatccggcgtgcagtcgccggatttttttatgattcgatatgagattgattttgtcttttttcctgttccgcgatgatttcattatcctccgcgttatcacgggttactttttgtgtaagaatcgcaccaactgctacaagtatcataacagcgatgtaataacctttttcattgagttccaggttatcagcattatagagtccgatactaaacaaaaatactcccgcaaaaaaagtaaaataagctaatactgtaaaggcaaccgtgtttctgcgtctatatttctgcacctttgttccctcccgaaagcatagttaaaaagtgataacttccgtggaatattatacctcaaattccccgtaatggaacaaagaattaaaaataccagtaaaaagggcttaggttgcctcctttatttcaacagctgaatcatcaatccagccgataagtttatcattgatttggaattggtaccatacagactggcctttctgttttttagacacaacctttatgtctttgccgacgtaagattgggcagaggtaagccttatggaccgatcatcagtagagggcttggaccatacgtcttgaacggcactgtctttaatagaggcgtttaaatccacagatttgagggatggatttacctcatcgtactcatctaaatcgtatttttccacaatagcgctgattttgtcagcgtagtcagggtctgtagcatatcctgatgtttgcagggcggttgccgcttccttataattccctgcctcaagcaccggtttatacttctttttattccacgatgtgccacgaacgaacaattgggcgtgatcatccatagattcaaaaaacgtgctgtattttcgaaacttcgcgcgaatggtttttcttttccctttttcaacttcgtccgtttccatcgtgacatgatggcctttataattcccttttacgccaaaaaggttgttggccttagcagccagttcactgttcccccagtccgattcgagaatggcctgagcaattgtgatgctggggagaacatggtatttttcatacaaaatttgggcatgtccggacagactgtctataaatacttgctgttcatcgatttcttcagtttctttggatatttcaatcggttttgataaagttgtcgctaaaacaaacagagctagcggaatcgatacaaggaaaaatagtgaaatcaagagtttacgttttttaagttttttacgggccatgaaaaccttccttcgaattaaaagattacgaatgtaaaagaatctaccttttagaattttacttgcacttctaatatttttcaattctttagggataaagttgggaaaagattgcaaaataaaaaccttttcgctcaatgaaaaggtttttaccatgtttctatttttgtaaatttctgagtgcattacgatattccgtatcatttattactttatatgatttgacagttgccttcgacaaaccttctgctgaaacggccggtttttccggagctgttttcgctttatcatgtggtttatgtgccagcttgtgccccattccagtggcattcatacaaaatgacaggcagacgagcagcacgctaaggataaaagaaatgaagaagagatcatgataagcagtcatcatagaatcctgttccgaaccgctttgtctggcagcatcttttttcgtgaaaaagccgatgagaatgggaactcccatatagacaaacaatcttaaaaactgaacagctgtcattctcttgaccaaatcaggcagcgggcctcccatggcagctcccatcagccctgcggcgactgtcaggcctgttcccgctgcaagcatgataaacagtgccgcgaacatataaagagatgatcgatcctgtatatgcagccattgaaaattcacaaaaacgagaatgagtccgccgataataccgagcatccctggtccgactttatcatataacagagcgcttaaaatggccgcgatcgccactccgattaaaagagtcaagtttaaaaaaatgagatgctcctgagaaatatcatacatttgacggagcaagccttgaaaagcagacaggctgacagctaccgttatcgtccctgcagctatgatcaataagccaagcaccggttttggcagcagcatcagtttaatagatatgaaggggtttttcactttatattccacaatcaatagaccaatgagcaaacataacgtcaccccgaaaccaatccatacataacccgatgacagcccccatttttgcagaaaaatgaatgaaaccgctgaggctgcggcaaggaagacagataaaagaattcccgcacgatcaagcggctgttcttgatccgccgctccgtgatgctcatcatgaagaaagaaatagctcaccgcgacaccgatcagggacaaggtgccaaagatgataaacagccatctccaatgcccgcagcttgttgcaatggttcccaggattgtaccgatgataacagaaccatagaatcccccgatcagcacaagcagtgcatagttcctgcgttcaatcgggaatgacagtacaagcattggaatcataatcatcagcatgacgcctgttgccgccccctgtaaaaagcgccctgccgccatccatgcaatatcgcctgaacatgcgatgagcagtgagcctagtataaagacaggtaatgaagccagatagacgggacgcgcaccgaattttttcctcagcagcggtcctgccggaactaacaaggcaaaggccatattgccgatcaatatcgggtttactaatgtgaagacacttgttccaaccgctttctgaacaaggccttgaactgacgacaatgccgtgttagacatcaatcccggcccgaccgctaagacggcgagcaaagaaatcacccaatagtgttttgtcttcatgttgtcattccttcctatatgaatacatgcgaaacacatcattttttgaaaacaaaagaagctaatagattttgcataccattagctttcattctaatattctccctttcaggggaaatgatattattttattataattatgtgaatgaatgagcatataatcaaatattatttcaaatcgattgtgttttgtcaatggagtaaatttcaagcacaacatagaaagcttgaaagcttttccccgatattgtgtctagaactgcacttatgaatccctgctcgttccctcaagcgaattaaagcaggccgttttaatcctttcaatccactattcccactaataaactcgaataagttggtgataagacaacattttgcccccacatttttttgtgttcactgggcgtttgccgcctctaaattgtatatgggtaaataccatgaattaacctatgaaataccaatgtaaggaaattctaaatattccgggaggcaaaaacgaatggaactgtatgagtgtatccaagacatttttagcggcttgaaaaatccatcggttaaagatttagcaacgtctttaaaaaaaattccaaacgcagcaaaattaagtcaaccgtatattaaggaaccagaccagtacgcttacggccgaaatgccatctatcgaaataatgaattggaaattatcgtgattaacattccgccaaacaaggagacaacagtccacgatcatggtcaatccattggttgtgcaatggtgttagaaggaaagcttcttaattctatttatcgctcagccggcgaacacgcagaactctccaattcatactttgtccacgaaggagaatgccttatttcaaccaaaggtttaattcacaaaatgtctaatcccacatccgaacgaatggtgtctcttcatgtctactcccctcctttggaagacatgacggtctttgaggaacaaaaggaggtattggaaaattcatgattgacagataaactgctcactttgacttcgctcaactggaggattcagagaatgaatcttttcctcaaaacaaaaaaacccttatagaataagggtttacaggtatggagccaagggggctcgaacccctgacctctacgctgccagcgtagcgctctcccagctgagctatggccccgtatgtaatgtcatgtttattatagatgattttattttgaaaaacaagctgtttcctcttgaattgacagaaaaaataaggctcgtaaaagagccttattttcgacttacatcatgatcaaaagtaaaatcacaccgagaataattcgatagattgcaaatgggacaagtttgattttgttaatcagccttaagaagaaacggacgacaaacagtgcgacaacaaaggcacagataaagccgacgatgaaaaatggcatcagatccgagcttaagctgtcccaatgcttcacgaggcttagaaagctggctcccatcatgatcggcatcgccataataaacgtaaagtcggctgcagctcggtggtttaatccgagaataacaccgccggaaatggttgaacccgaacgcgagaaacccggccaaagggcaagacattggaataagccgacggctatcgcctgtttataggaaatgcggtcgagtgtgtctgtcgctgttttccgtttattgacccagtcagcaaaaagcatgaggattgccccggcaattaaaccgatggccacagttttaacggaaaataaatattcatcaatgtaatcttcaaacaaaaagccgagaacagctgcaggcacgagtccgacggcaatttgggcaatgcttaatttatgtccctgctcctggtcgcttgtaatattttttttcaagcccagtaagtttaaaattcggtctttaaacacgatagctactgctaaaatggagcctagctgaataaccaccttgaatgagttagcagcttcttctgacatcagattacttgatttaagccagatgtcgtctactataatcatatgtcctgtcgaagaaaccggcgcgtactctgttaatccttctacgattcctaaaatggcggctacaaacaattcccatagagtcatgattttgattctccccattagacatttatttttttacataacgggagcttcccataaatggaaagcccgtcttatataactataaacgaaaatcacactttatgccccggcgtattttcatttttttcttcatcgtataaatgtgaccgcattttaaaccagtcaaataaatgtgtcgtaatgactttggcaaccgcatagccgggaatcgcaagaatgattccaacaacgccgaacagcttgccggctgttaacagcagaaaaataatcgtaatcggatggatgtgaaggttttttcccataatttgcggagagatcagcttcccttcaatcagctgaacaatcgtccaaacgatcaccagcttaagcagcatgagcggcgatgtcactatggcaatgataatcgcaggcgtaatggcaatcgttggccctaaatatggaacgatgcttgtgcaagccgcaatgactgcaagcaatgaagcataatccagcccgataatcaaataaccgataaacagcaaaaacccgatacagaagctgacaatgatctggcctctgatataagagcttaaccgatgattcatttcgcttaagactgtgtatgtctgttctttcaattgcgtcggaacaaacttcagtatgtagaccggcaatttttttccgtcctttaacaaatagaaaaggataaacggaaccgtaacgattgaaatgataatctcagtcagggcgccgataaaattcccaacgccggtaaaggtactgttcacaattgtcgctgcctgatctgaaacctttgttgcgagatcagatatattgatgttcgtcgtttgctgggcctgattgacgaagttgctgccgatcagctgtttcgtctgattttcaacgatatccacatatcttgggatgttgtcgattaaactcataatttgttcttttaagaagggaatgatcgacacgattgtgatcgtgatcagcccgataaccaatagatatagcagcaatatagaatagattcttcttattcttcttctctcaaggaaatcgacgaccgggtttaacagataaaaaacaatgcctgtcaaaataatcggaagtgatatcgttttgagcaaaacaataatcggggtgaaaataaatgatgtttttgtaaatactagaatatttaaaccaatcagcagcagcacaagcaaaaataaaacaaacttattatccaagaagaatcgcttgaatctgccgctccatgtttgcaacgtctccactatcgttcctccgtcatacatagtttaattaaattgtacactatcgtccctataatgaaaaataaaaaccgttaattgctggaaaagctttcacggttttaacattctatttatatctatcatgtgattttgttctttttaagctataatttagctatatcatgcaaaaggagcgatacgagtgatacgttttgcaataataggaaccaactggattacagaccgctttcttgagtcagcagcggatatcgaagattttcagctgactgctgtttattcaagatcggctgaacgcgctggcgagtttgctgctaaacacaacgctgcgcatgccttctcagaccttcaggaaatggcggcgagcgattgctttgatgccgtatacatagcgagcccgaacgctcttcacaaggaacaagccgttctctttatgaaccatggcaagcatgtgctttgtgagaagccgtttgcttcgaatacaaaagaaacagaagagatgatctcagcggctaaggcaaacggcgttgttctcatggaagcaatgaagaccactttcctgccgaatttcaaagagctgaaaaaacacctgcataaaatcggcactgtccgcagatttaccgcaagctactgccagtattcctcacggtatgacgcgttcagaagcggaactgttttgaatgcgtttcagcctgagctttccaatgggtcattaatggatattggcgtctattgtatttatccggctgttgtgttgtttggcgcgccgaaggatgtaaaagcaaacggatatgctttatcctccggagtggacggagaaggaactgtcattctgtcttacgacgggttcgaagctgttctgatgcattccaaaatctctacttcctatgccccggctgaaatccagggtgaagacgggacgattgtaatcgatacgattcaccggcctgaacgtgttgaaatccgctaccgggacggccgccttgaaaacatcgcgatccctgatcctaaaccagcgatgttctatgaagcagaagaatttgtcacgctcataaaagagaataagctggaatctgaagaaaatacatttgaacggtctttgaccactgcaaagattatggaagaagcaagaaagcaaatggggattgtataccctgctgatcaagcttaaaaaaatccgcccgcgtgcaaatgccgcggcggattttttattaggcaatcggagaagatgccttcctttttaaaagcacctgttgctcatattctttgatgtcatgaagccatgcctcttttaccggaacgcccatttgctcacagtaggaatcccagatggctccgaaaggatatgttttgaattcctccatcagggccagcctttctgtatagcggccctcttcctgcaattgttttaaatatccgttcgggagaagcagggcatacaataaagctttgatcatatttctcgttccgatggtccaggcggctacacggttaatgctggcatcgaaaaaatccagaccgatggcgaccttctcaagagcatgatttcgtacaatttcaagagcgatttctctcaattcatcatccaaaaccactacatggtcgctatcccaacgaacaggccgcgatacgtgcaaggcaagcttgtctgtgtaaagcagcatggacgagatcttgtttgataccgtctcagtcggatggaaatggcctgtatcaagtaaacaaagcttatgattcgtcaaagcataagctaaataaaattcatgagatccgacaacatatgattcggagccaagcccgaacagcttgctctcgattgcatcaagattgtgttgttcactgatctcctctgcgaagatccgatccagtgattcttttagtcttttacgcggtgtcagcctatcactcgggatatccttatagccgtcgggaatccaaatattcgtcaagcaaggtgttcctaattctttcccgaagtattccccgatacggcggcaagcgatgcaatgcctgatccaaaattctctgatatccggatcagggtgtgaaagggtgagtccgtcagccgctttctcatgcgaaaacaaggttggattaaaatctaaaccgagaccaaggttttttgcccatttcacccagttttcaaaatgctgcggcttcaattcgtcacgttctaccgcttccctgtttgtttctgcgtatatcgcatgcaggtttacgcggtgctttccaggaatgagagaaagagccttctccaaatctcttcttaattcttcaggagtttgcgcttttccgggataattgccagtcacgtcaattccgcctgaaagctcgcccttatttacttcaaagccttcaatgtcgtcaccctgccagcaatggatcgaaatgggcacttgctctaattgccgaagcgcctcttcaacatcaattccccatttttcatatgcctgttttgcactgtcataattggcttttatggtcatacggctctctccctttatcagttttttaatccaaataaaaaacttcctttagatctatcgaaacaggactgaaatccgaatttgttttcattaatggcgccatcgatttccaccatcttcggcaaacttccgtgtccgccatctttctccatttctcttcatcctctatttctaaatatgcaaaaagcctgcctgtttcctcgtctagaaaaatggaataatggtgtgctccatgagctttgagtgcttctgccatctcaggccaaatgtcatcatgccgctgtttgtattcttcgtacttgtcttgatggacaaacatgatactggcttttcttttcaaaccttttcacctcttcatcatttagatagcgctttcaaaacagtttgctgaaatgactgaatgatcgtgcttctgtcaatgtctttaggtgtaaacactttgatcggaaaggaatttctgacgacttgccgggcttcttttatgtctttgacttctttggcagcaatcatttgcatcaaaagatttccggtggcagttgcctctatcggccctgcatataccgcttttccactcatgtctgccgttaattgatttaagaaatcattccgggctccgccgccgatgatatgaaattgctcgatcggtttttctgtgattgtttcgagctctttgatggctatcgcatagatgatggctaaattgctgtagatgcagcaggcaagttcgcctgcagtgcgaggagtcttttggcgggtttgtctgcaataatgttgtatttcctttatcatgttttctggattcaggaaacgtttatcatttaagtttataaattgctggaatggttctgtttttttggcttcttctgcaagctgctggaaagagtaatctgcttgtaactgttgtctgacttcttgtatcacccacatgccgataatgtttttgagaaagcgaatggtgttgtttgcgccgcgttcatttgtatagttgttttctaaagcaagatcagttattatcggtgttttgttttcaaccccgattaacgaccatgttccgctgctgatatacgcccagccatcatttattcctggcgctgcaatgacggccgaggccgtatcatgtgttgcgactgtcatcaccttgcacgccgggagatcataatccgggaaccactcatttcttagcttcccgagttcacaccccggttcagtcagcggggcaaattgctgttcctgaacggacacggcttcaagcaattcaggatcaagatttcccgttgaggcttttaaaagctgtgttgtggacgcatttgtgatttccgttacagcttttccggttaaacaatagcctaaataatcaggaatcatcataattttgtctgtctttatcagcagctcacggtcttcctcatacaattgatagatcgtgttgaaaggctgaaattgtattcctgttttttgataaattgcggcttttgagagggtatgttccagtttgtctattgtgtgatctgttcttctatcacggtaggagattgcttcccgcaaccgatcgcctttttcgtccagtaagacataatcaactgcccatgtatcaatgcctacggtgcagtgttcatacccaagcgtctttactttttgcagtccttgcaggatttgttttagcaaatgatcaatatcccaaaagcaatgcccgtctctttgactgaaaccgttagcgaacctgtgaatctcttgtatgtcaagcttcccttcattcagttcacctaccatgattctcccgcttgatgcgcctatatcaatggcagtataaatcatcctttcaccctctcttcgaaagaggaacagctgtcaccttcacctttttgtcctcaagagcttttaccgatgccggatcaagtccagaatccgtaataaggcggctgacatcttgcagcgaggcaatatgtgaaaactcgcggttcccccatttgcttgaatcggccatcaaaatggtctggtccgacctttcgatcatccgttttttgagcagcgcctgccactcatttgaatcactcatcccgttgtgtacgtcaaatcccttacatgacagaaaggttttattgacatgataggtctcaagtgaacgctctgctaacggaccggcaaatgataatgatttttccagcaaaatgccgcctgttgaaatgactgatatgttttctttattgctgagttcaatagctgctttcattgagtttgtaatcacggtgagctcaatgtcagggagtatttttgccatgtaccaagcggttgtgcttgcatcgagaatgattcggtctccgctttttacatatttggccgcttcgtgagcgatggcttttttttcgatgacattcgtgatttcccgttcagaaaaatgaatttctgattccttctgctgaatactgaccgctcctccgtggctccggctcagtttatgttctttttcaagcttttcaagatcacgccgaatggtttcctctgtgactgaaaatatgtcacttaattcggaaacgcggatgcttgaacgcatatttactatttccactattttttgctgccgttctgctactagcatcggtaacgcccttcctcatatcgtagtccgtcttatattttttatcatagcatatttctaacgcgtaaaagcagcagggacgccgccgtctaccgtgatcatgcagcccgttgttttttcggctttggaagaagcgaagaatgcaatggcttcggcaatatcctccgggtaaatattgacgagcaatgctgtccgtttccggtaatgttcctccagctgatccggttcaatcccgtacgccgcggctcgttcctcccgccagcttgaaccccagattgccgatccttgaagaaccgcatcaggcaaaacagagttgaccctaatgccgaattctccaccttctgcagcaatgcatcttgctaaatgggtttcaagcgccttaaccgagctgtaggcagaggcgtttttgcccgcataaaccgaatttttcgatccgacaaataccatgcttccgcctctattttggtgtttcatctgtttaaacgcttcacgggctacaaggaaatagcctgttcctaaaacattcatattaagattccattcttttagacttgtttcgtcaaatgggcttgatgtggccagcccggcattattgacgacgatatcaatgccgccgtaagcaagcgccgctcgttcaaaagctgattgtacgtcttcctcctttgtcacatccattttgacagccattgcccgtccttctccgtatgcatcgtttatttccccggcaattttctgtgcaccttctatattcagatcagctacgatcacgtgccctccctcagctgcaaatcggcggcatgctgcactgccgattccgccggctcctccagttatcaacgctacttttcgggaaaattctgcttccggcggggccagcgtgagtttatatagttcgagcggccaatattcgacatggtaggattcattttcatgtaaagaaacaaattgccccagagcggttgctcctttcatcacggcgatggccctccgatataaagccccgcttactttagacatggcataactttttcctgtattcaccattccgattcccggaatcaatatcacccgtggggaggattcaaagatttgatccccatcctgctgatttcgtgtaaagtaagcctgatactctgatgtaaaggtctcgactcctgacttgatcagatctgcaagcttgtgcacatcttgagtttccggattccaatcaatgtacagcggaacccgttttgtgtgaacaaggtgatccgggcatgccgcaccgatttgcgaaagtgctggcgcttggacactgtttacaaattccaagacatcgtcatgatcatcataggaaaggatcattttcttttcttcacttactgctcctctgatcacaggcatgatgcctgccaagatttgttttcttttatcctccggcagcggctgataccttttgcctccgaatacctcatgctgattgatacgatcgttaacatactgctcggcttcttgaatgatggatatcgttttttgataacatgtttcagacgtctctccccaagtgactaagccgtgtttctccattaatataagctcggcgtggggattgtttgctacgccttcagcgatcattttagacaaagtaaatccaggacggacgtatggcacccatacaaaccgatttccgtaaatgtcttcagcgatttgttttccattatccgcacagcatatgctgataatcgcatctggatgggtatggtcaacatgtttgtatggcagaaaagcgtgtaatagcgtttcaattgaagggcggggatgtttgctgtctatcatacaatgagacaggtagtctaccatttcttcatctggcatttggtcccttttaatcagcgggcggatatcatctaatttcaaaccggtaaagttatgcgctttcattgttgccaaatccgaaccgcttccttttacccacatgacttctatttcacggcctctaaaatccttttccgttgttttcatagatgtattccccccgccccagttgcagacagtgcggtctgacccgatcagattggacctgtacaccaattcctctacacctttaggcagccgtgcagctcgctctgaatcccatatatgtttcgccatatttgatattcctccatccccttttatttgtatccgttttcattatatatgatttctgtttgtttttgaattgtttttgtttatttttgcttttaacaaaaaagaaagcagcagatatgccgctttcttgtttcattatgattctattttaaatttcttcgtaatgtcctgaagttcttccgccatgtttgccaacgtttccgctgaagagctgatttcttccatggacgcaagctgttcttccgccgaagctgcgatatcctgaatgcctgctgagctttctttcgccactgcagaaatatcttcaacagcacttgacacttcctgtgatccggctgacagttgttcaaccgtcgcgttcaagttttgcaattcgccggaaatttgggttgtcatctcatagatttgtttaaagctttccgctgtttgatccgtaatctgcaagccttctttcacttcatgattcacggattggaacattgaaagtgaggtgctgatttccctgacaatctcttgaattaatccttcaatttccttggcggagtctgctgattgtacagcaagttttctaacctcttccgcaactactgagaaacctcttccgtattctcccgctcttgccgcctcaatcgcagcatttaatgcaagcaggttggtttgatcagcaatgccattaatcacattcaagatgcttgtgatatcttgcgattttgtttcaaggcccttcacaaccgcttccgctttttgaacggattggtcaattgttttcatctggccgactgtatgctccaccagcttttctccgctgcccgctgcctcagaggactgaatcgatgatttcgtaatggttgaagaggcctgagccacttttgaaatcccctcgttcatttgagaaagatgatttgagcttgtttccagtttctcgctttgtgcctcgttgccatctgagaattgttcgatggcaagtgtaatatgttcagttgccttgctcgtttgggctgcgcttgccgtcagctcctcagaagatgaagcaacgttttctacagacgtttgaataacgccgattacagaacgcaatgatgcagacatttcattaaagctttcgccaagctggccaaactcgtttttcgagtgaatgtcaatgacttctgtgagatctccactgctgatttttgcagacgttgagacaagttttcttaacggcttggtgatggcacggataatatagagaatgagtatgccgccgattacaattgacacgcatagaatgataaccgcagtgttcagcaccggacttgaagcatcttgcaattcactgacaaaatatgtgcctgcgattttccagccagtcagtttatttgtcgtaaaggccattttcttttctttgccttcgaatatatattcaaatgagccttcttttttggaatatacttggtttgtccaatcgccggatccggttgtccccggcttaattgtcggatgggcgatatattttttgttgccagtcgtaataaatgcaaagccttctttaccgattttgattctttgtgatgcagtaagcacttcatccaggtttaaatcaagcgctataacccctgaaccgtcttttaattgttttgaaattgtgacaacgatatctcctgtcgcttcatcagtatacggttctgagaaaacagcttgtcctttttccgcaaccgcctgtttgtaccagtcacgtcctgtcggatcgaaacctttcggaacaccgctatccggatatttataaagcttcttatcttctgaagcagcatagattgcgcctacatcgtcgttaagtgtcgtgtactgcttaaatttctctttcagtaatgttttgtttttgcctaacaatatgtctttatcgactgtctcactataataatctattgcttttactttatcttctaatttattttgcagcgtactgtttagttcttcaacatttcccttcgcactgtttatgagctctctgtctaacgcgttccaagctgattgataactgaaatatgctaaaaccccaaccggcaaaataagcactgccagaaacgcagcgattagcggtttgctgatcgatggctgtttgatccaatgtatgaattttcccattcttgttgactcctcctttaagataaatctaatatcgtcaaactaggataaaaggtttaataaaaaaactaaaaaaaacacccaagcgtaacaagcttgggtgttaaggcttattattcgattttgaatcgtttggtcatatcgcgaagctcttccgccatagacgaaagggtctctgcagacgagctgatttcttccatggaagcaagctgctcttcggctgacgccgcgatatcttgtatatgcgctgaactttcttttgaaatcgatgcaatgtgctcagacgctcccgaaacttcttcggagctggcagaaagctgctgaaccgtcgcactcatattttgcagttcgccggcgatttggttcgtcatttcagaaatgcgtttgaagctcatttctgttttatctgtgatgtcaagtcctgtctgcacctcttgattgacagattggaacatgccgagtgatgtattgatttccttcacaatttcgatgattaatccttcaatctcttttgctgaatctgctgactgtactgccagttttcttacttcttccgctacaacggagaagccgcggccgtactcgcctgcgcgcgctgcttcaattgctgcgtttaaggcaagcaggttcgtctggtctgcgatgccattgatcacacgcaaaatgtttgtaatatctttcgatttcgtttccaatccgcgtacgacttgctccgcttctttaacggacttgtcaatgacattcatttggccgacggtttgatgaacaagcttgccgccttcacttgcaatttctgtcgattgaacagatgaatcagtgatcacttcagaagcttgagccatattcgtcaacccgtcattcatttgataaatgtgctctgctgccgtttcaatgttttcgttttgtttttcattgccgttagaaaattgttcaatcgccaatgtaatgtgctctgttgccttgctcgtttgcgcagctgatgcagtgagctcctcagaggaagcggcaacattatctacggaatcctggatggcgtgtatgagagaacgaagtgacgacgccatattgttaaagcttttgccaagctcgcccaattcatcttttgaacggatatcaatggtttccgtcaaatctccctcgctgatccgcttagaggaaccgacaagctgtttcagcggtgttgtaatcgaccgaatgatcaaagtcatgacgataatccctatgataatagctgcggccaagacaattaaagcaaggtgtaggacaggctgggctgcctcatggatttcatccaaatacatggtgccgccgatcttccatcccgtcaacttgtttgtgtcaaaggccatttttttcttatcgccatccatggtgtattgaaaatcgcctttatcagcactcaacatcttatcgagccagtcgccttttaattcagttcctgatttttcattaggatgagcgacaacttttttgtccttcgtcatgataaatgcgtagccttgtgtgccgatgttgacttttttggttgttttcagcagattttcaatggtcatgttgattgcgataacgcctgaaccatcttttgtctgctgggcgattgtcacaaccatcgtatttgtcgacgcggttttataagggtctgtgatcacgactttccctttatttgcaaccgcttttttgtaccagtcgcgttcaaccggattgtagccgcttggcatcggaagatccggatagcgggtaaagtgcccttttgtgtcacttgtataaatggattctacatccttgttaatgctgatatattgtgagaatttctctgcaatgcttgcattgctttttgcattgtatttctcttttgtcagccattcgctgaaataatcagcactgttttctttttcgccgatgctggtgttaatgatttcgtttaattgctgtacattttccaatgcgctccccatcatctgtctgtcgagtgagctgctagccgattgataggcaaagatcgccaatataacaaccggtatgatgaggatcgacagaaaggaaacaagaagcttccgtgtaattgatctttgttttatgagttggagtatttttttcatcattcatttctccttttttatgctacccttcatatcggctggaaatgggtaaatatatacagcaaaaaagaagaaatttaacaaaagtaactaatttcccataaataaatagtattttagacctattatttatctactttaaattgttttgtcagatcacggagttcttcagacattctttcaagcgtcagtgcagatgaactaatctcctccatggatgccagctgttcctcagctgaagcggcgatatcttggatgccatccgagctttccttagaaatggcagtgatatcatttgaagctgcggaaatttcttgagctcccgatgacagctcctcaaccgtcgcattcatgttttgcagctcggaagcaatttgattggtcatttgcgatatatgtttgaagctctgtttagtttcatccgtcatgacaagccctgtttcaacttctttgtttacggactgaagcacgttcagtgatgtgtgaatttcttttactatttcactgatcagcgattcaatttcttttgctgagtcagccgactgtaccgcgagctttctcacttcctcagcgacgactgaaaagccccggccatattcacccgctctggccgcttcaatggcggcatttaaagccaaaagattggtttgatccgcaatgccgttgatgacacgcaaaatattcgtgatatcctttgatttgatctccagccctttcaccacttgttccgctgattttacagaatggtcaattgtgttcatttggccggctgttttctggacgagtgtctcccctttacttgacacttctgttgaatctgcggatgtttctgtaatcactgctgcagcccgcgccagctctgccaatccgtcattcatttcattaatttgttcggttgtcgtttctattttctcgctttggctttcactgccgtttgaaaattgctcgatagccatcgtaatgtgctcagtggctctgcttgtctggtctgccgatgcagtcagctcttcagacgatgaggcaacgtgttctactgagtctttgatcccgtgaatgagcgagcgaagcgagtgtgccatatgattgaagctctcgctcagaacgccgagttcatcttttgaattgatttcaatcgtttcggttagatcgccttcactaattttttcagcggatgcgacaatgcgtctcaatggctttgtgatggatcgaatcacaaaataaatcgccgtcattccagctgcgatggcaatcgccagaacgattgaagccatgatcagaaccctgcttgcagcatcgtgaatctcgtttgcatacatcgtgccgctgattttccagcctgttgtttcgcttgttgcaaatgccatttttttctttttgcctttgtacgtatattcaaagtccccgcttttatccttgtagagcttatcaacccagtccccttttagctctgttcccgctttttctccggagtaggcgatgactttcttgttttggctcaaaataaaagcatagccttcttttccgatattgattcctttcgcggtagtgactaagtcatcaattttcatatcaatggcgacaacacctgacccatccaccgtttgacgggcgatggtgacgaccatttttcctgatgaaatcgattcataaggctcagtgacaattgttttgcctttattggccattgcttctttgtaccaatctcgttccaaagcattaaagtcacttggcatgtcagcgtacggataacgggtgaattccccgtctttgccgcttgaaaataccgcagcgacattatcattcatttggataaattgtttaaattcctgtttcagctctgttttctttttatcctgaaatttttcttctgtagcccaatcgctgaaatatgcgaggcttttttcagtcgtgctgattttatcatcaatgatgtgatctaatatctgaacattttcctttgcgctttgcgtcatctgtacatcaagtgaggcaactgctgattgataagcgctaaccgaaagggcggttatcggaacaattaagatcagcaggaaagaaataataagtctccttgcaattgatgatctgcgaatagtggtgagtgtttttttcatttccttttgaaccttctttcaataatttacaaattatatcggcggatcttcctttaaattacattgaaaatggaggaaaaaatgaaaaatagttctaaattcacctgttaaactaggactttattattgtttaccatataaaaaacagcgctttgatagcgctgtttttcggcttttactcgattttaaattgtttcgtcagatcacgaagctcttctgccatctgcgcaagagtggtcgctgaggaactgatttcttccatggaagcaagctgttcttcagctgatgcggcaatgtcctggatgcttgccgagctttctttcgacacgtctgcaatgccgctgactgctgctgaaacatgctgtgaacgatctgacagctgctcgacggtggaattcatcgtctgcagcttgcccgcgatttcgtttgtcatgctgaaaatgctctggaagctttcttttgtattgtctgtgacaacaagtccggactgtacttcctgattgacctctttaaacatgtgaagagaggtttcgatttctgcgacgatttcttggatcagcttttcgatttcttttgctgaatcggctgattggacagccagcttgcgcacttcctccgctacgacagagaagccgcgtccagactctccggcacgcgccgcttcaatggctgcatttagtgcaagcagatttgtttggtcagcgattccgttgatgactctcaaaatgcttgtgatgtcttttgattttccttctaagcctttgacaacagcttcagcctgctgaacagattgattaatcgagttcatttgtccgactgtctgctgcacaaacttctcacccgttccggcgatttccgttgattggatagatgcctttgtaatatctgacgatgtttgtgagacttgctggagtccttcattcattaagttcagctgatgagagctggattcaaccttttcgctttgctcctcgtttccgtttgagaactgctcaatcgccatcgtaatatgctcggtggctttactcgtctgcccggcagatgcggtaagctgttcggaagatgcggccacattgttcaccgagtcctgaatagcactgatcagcgagcggagagattgtcccatttcattgaagctttccccaagctccccaagctcatcctttgaatggatttcgatcgtttcggtcagatcccccctgctgatcgttttcgatgattgaacaagatgttttaacggttttgtaatcgaacgaacgataaacagaattaaaattccgcccgccacaatggaagcaatcagcacaatcattcctgtagtcagcacagactttgaggcatccttaatttcatccatatacattgtgccggctattttccaaccagtcagttcgtttgtagtataggtcatctttttatcttcgttattaagagtatactggagttcaccgctgtcattcgcatacattttggctacccagtcgcctgaaagcttttctccagccttatggttcttgtgggcgacataggttttgttttttgttgcaatgaaagcataaccttcttttccgaccttgatttgtttcatttgttctaacaatttatcaatggtaatatccatggcgacaacgccagatccgtccttcagctcctgtgcaatggtaatgaccatgcttccgtcactcgcagccacgtaaggatctgtcacgacaatttcaccgccggccttcatcgcatcctggtaccaaggccgttgtctcgggtcgtatccttccggcaatttttcttttggcgcttgtacataagtgccgttatctgcgcccccataaattctggctactccttgattaatagatacatattgtgaaaatttagctttgatctcttcttgattcgatttccctttgaatgcggaccttttaagagattcactgaaaaaggtgactgctttcgctttttctcccagatcatttgtaacagttgtattaaatgtatcgacactgtttttcgcatttcccataatttcctgatccagctttccgctggcgcttcggtaagagctaaattctaatataagaatagggataatgagaatcgcaataaatgagacgattaatttctttgaaatagacggtttcttaagccaattgataaaagtcttcatgtccacttgctccttcaggtttgatacagtatatatcggctgcttaaaaaagttttaaaataaaaaatggaagaagttctttttggctgtcttctgtcgttttaactttcattgcccaagctctttgcatatcttataaaaaacaaggggggctaaacatgattattgtatcaggacaattgctccgtccccaggatattgaaaattggcagattgatcaaaatctgaatccgctgttaaaagagatgattgagacgcctgttcagtttgattatcattcaattgctgaactgatgtttgagcttaaactgcggatgaatattgtagcagcggcaaagacgctgcacaaaagcggggcgaagtttgccacttttttaaaaacatacgggaatacaacgtattggagggtttcaccggagggcgccttggagctgaaatacagaatgccgccttcaaaagcgattcgtgacattgctgagaacggcccgttttatgcgtttgaatgcgcaaccgcaatcgttatcatttattacttggccttaatcgatactatcggagaagataaattcaatgccagctttgacagaattattttatatgactggcattatgagaaattgccgctctatacggaaacaggacaccactttttccttggagattgtttgtattttaagaatcctgaatttgatccacaaaaggcgcaatggagaggcgaaaatgtgattttactgggggaagataaatattttgcccatggtcttggaatcttaaacggaaagcaaattattgataagctgaattcttttaggaaaaaaggagccttacagtcagcctaccttctgtctcaggcgaccagactggatgttccgtctcttttccgcatcgtccgctaaaaagccccatcgcctattttccggacgatggggtttcaaatgcctttcgttttcgatagaagggggctgtgccgaaatattggttcgcagcccactccattttttcaaggtcatttcttgtcacgattggatcctggctgctccatttgataaagcggacaaaatagtagcctttgataggaaccattgtaacttttgagtgaggccagccttcaaatacaaactcaattttccctctttttttataagagtattgaagaatgttcatatttgtcacctcagtttatcaagttacgttcggcaaagctcggtacgtttacatccattgattgactatccctcatgcatgctttcctgaaaacaaagggtgaggcgcgtgtctctttccctcgctttttatttcgcatatggacgaatgccaagcgcgccttcattcgataaagcggcagccggggcgggtgtgacaagccctccggctatcggcgtttgttcagcgatcatgcttttgtcaaaaaaacagcctattatcccatcattttgatatagcatgtccgggtgcgagggccgtcaaattcgcagaaataaatgccctgccaagttccaagaatgagccggccgttttccacaatgacatgctgtgaagctccgactgtactcgacttcatgtgtgcagctgtattgccctccatatggcggtccagctcatgttcccacggatatacctcatcaaaccttctgagcatatcttttttgacgtccggatcggcattttcattaattgtaatgcccgcagtcgtatgcggacagtaaatcagcgctgcgccgctcgttatacctgtttcttgaagaaacgcttccacctcccgggtgatatcaatcatttcatctcgtttggttgttttgatttgcagtgttttcagcatttgtttctcctttcgtttgtccgctctcatcgcttaattcgttctgtgttcttttttttcctgttaaaccgctctcataaacccgataaaacaaaaaaactccagtctaaggctggagtttagcaccatagatatattcttgcttcatacggctttaagagtactgatgtcatatgcttgtgcggctctgtttcaatatttgacaagacgagtgcatctgatgacaatggcaatccagagtgcctgaacaacgccggtgttcctgtcagattggccgcaatcagtgcagtatggctctcgtttttccgaagatatgcaaagatttgctgatcttccggtaaaatgagctcgtatgtcccgttaataaaaacatcatatgtttggcgcagcttgatcaagcttttgtaaaaatggtaaacggatgttttatcgtttttttgcgcctcggcattcagccatttgtaattctcattgattccgatccacggtttggcctcagaaaatccggcgtatggacctgcattccattgcatcggcgttcttgaattgtctcttccctttttccagacaatcttcatcacatcctcgtgtgatgtgcctttcgctgtttttgtttcatacaggcgtttcattgcgacatcatcatagtcctcaatagagggaaaagccacgttcgtcatcccgagttcctgtccctgataaataaacggtgtgcctttcatgagaaaataaacagcggaaagcgcttttgcactttctttcaggtacactccgtcgtctccccacacagaaactgaacggggctggtcgtgattctccataaacaaagcattccagccgatcccttccagactgtcctgccagtcagttaaaattcgtttaaatgcaacgatatcaatactttcattgatctctacatcccacaggccgagatgctcaaattgaaaaatcatgctgaatatgccgtttttttctccagcccaatcagctgcttcttttgcagcgacgccgtttgcttcaccaactgtcataatcggatagcgggaaaatgtgttttccttcagctctgttaacaaatccataatgccgtcagcattcatatgataaggaaaggaagggacatagtccaatccctttggattcggcatgtcgggaagcccttcttttttcttaatatgcgtaatggcatccacccgaaatccgtcaattcctttatcaagccaccaattgatcatgtcataaacggcattcctcacctgttcattttcccaattcaaatcaggctgttttttatcaaaaaggtgcagataatactggcttgtcttttgatcatactcccaagccggcccgccgaaaatgctttcccaattgttgggcgcttttccgtttttgccgtctttccaaatataccagtcgcgcttttccgagtgtatggatgaacgggattctatgaaccatggatgttcgtcgcttgtgtggttcacaacgagatccataatcagcttcatccccagatcatgaatgtcaccaagcagttcatcaaaatcttccatggtgccaaactcgcttaatatgttttgataatcccggatatcatagccattatcagcattcggtgagtcatacagcgggcaaatccatatgacgtcagcgcccagctcttttatgtaagaaagcttggatctgattccttgaatatccccgattccgtcgccatttgaatctttaaaactgcgggggtaaatttggtaaacaacggtttccttccaccaagcctttttcatacagccactcctttccagtgtaccggtcttatatatcctatgtagaaaaaaggcttcacagcattgctttttaagaaatgacttgatgacacaaaaaacagccgtttgttccccggctgttttttatcaaaaatcagttttttttatttctacaaaacggatgtggtgatcttcggcgtcgaggattttaaattcacagccctccgcgtgtatcacatcccctgctttcagctccattttttgcgttagaagccagcctgcaatcgtatcaatttcttcattttcaatcgcaatgtcgagaaggtcattcacttcgtctattagcgcttttccatccatcacataatggtgctcgccctttttcaggatgtgcggtgtttcatcctgatcatactcatcgcggatttccccgacgatttcctcgataatatcctctacagtgacaagccccgccgttcccccgtattcatcgacaagaatcgccatgtgaatccgctccttctgcatgcggattaaaagctgctgaacaggaatgctttcaatgaccctgataacgggcctcatgatttgctccagctttatcggctggccgagaaaataagctttaaacatatctttgctgttgatgatccctaaaatatgatccttgtcatctttgatgacagggtagcgtgtataccgttcattaatgatgtgatgaattgcctcttcaagcgactgctccagagagataaccgcaatttctgtccgcggaatcataatctctctcgctacccggttgtcaaattcaaaaatcttatttacataacggaattcagactgattaatttctcccttttcatagctttctgaaaggatcagtcttagttcctcctcgctgatgacaacctgatgctcctttactgaatgaaagccaaacaatttcacaagaaaacttgcagagccgtttaatgctttaataaacgggtacgtgattttataaaaccagatcagcggctttgcaatccataagcttacagcttcagctttttgaatagaaaccgttttcggagcaagctcccccatcaccacatgcaaaaaagtgacgatgataaatgcaactacaaatgtgacaatgtggttaaacggttccggcatgcctgtcattgtaaataagggatgaagaaaacgttcaaatgtaggttcaccaagccatccaaggccgagggcagtaatcgtaatcccgagctggcaggctgataaatactcgtcaagattggagatgattttatgtgcggctagcgctcggctgtcaccgctttcgatgagctgattgatttttgaacctctgattttgacgatcgcaaattccgctgcaacgaaaacagccgtaatgccaatcaaaacaaaaatggcgatcaattgtaaaataagcaaaaaaagcccttaccataaatggtaaggggccacctccttaacgttaattctcatcacgaccgtttaagaaaatcatcacaaaacgaagtagttcaaacagggaaaccagggcggcggccacatacgttaaggcagcagcgctcagcactttatttaccccattttcttcattgtttcggatgaatccttctgacacaataatctgcttggcgcgtgaacttgcattgaattcgacaggcaatgtaatcagctggaaaaagactgccgctgaaaacagtatgatgccaagcccgatcaaattcaggctgccgagaagcatgcctcctaagaaaagcaaaggagctacaccggatgcaaaattcacgactgggaagattttatgtctcagcacaagcgcaccatatgactcctgatgctgcaaggcatgtccgacttcatgggaagctacggatatggcggaaattgagcggccgtaatagaccggctcagataaacgcaccacccgtcttgtcgggtcgtaatggtctgttaaagtgcctcttaccggttcgaccggcacgtcgtaaagaccgtttatatctaaaatccgtcttgccgtttctgcccctgtacgtccgcttgaggcttccacttttgaatatttttcaaagttgctctttactttaaattgtgcccaaaacgacaatcccaatgcggctattgttaaaaatataaacagcattttttcatcatcctttttccatgatcatttctctattaagattattttaatgagttttctttcccgtgtacagaaatgcgctttttcttccggcttggagcacagaatccaatcagcaaaaagaacaggcctgctgaaaacaaataaaaggcgaaaccgccggccagttctttcagaaaataaaaccaggagaagctgccggaaaagtgattatatgaattcaaatcgaaaataaacaaaatcaccgcggatgccgccagctgtgtaccgatcaaaaccacgatcgttctttgaaagatcgtcatctttttcatcctttttgttttagtttatggagaaatccggttttatatgttttgtacattttttgaaaaacatcaccggaagtgggacatactgttagaaaaaagcacgggtgtgatggaagctatgaaagtgacgagtgaggaaaaggaacagctgagcacagcaatcgaccgaatgaatgaaggactggacgcgtttatccagctgtataatgaatcggaaattgatgaaccgcttattcagcttgatgatgatacagccgagttaatgaagcaggcccgagataagtacggccaggaaaagctaaatgaaaaattaaatacaattattaaacagattttatccatctcagtatctgaagaaggagaaaaagaatgaaatcaaatcggatatttatttcatggctcaggtggccgttatttatccgaatcggggttattattttatgtctgattcttttgttcggccaaatcatttatatacttgagcctaagcagttcacttcggtattcgaaggcatttggtgggctgtcgttacggtttcgacagtcggttatggagactatgtgccgcacacgccgctgggacaggcagccggaatactgctgattttgagcggagcaagctttgtcacagcatatttcgctacgttatcagcggccgcattcagcagacagcatcgctacatcgaaggaaaagttgcttacaaaggccgggaccacatcattctgatcgggtggaatgaaaaaacaaaccggcttttgaaggaccttcagcttgccgccccttccaaaacggtcgtactaatcgatgaatccttaacagaaggcccgcttattgaaaacgttcatttcatacgcgggcacgctgccgatgatgggacactgaaacgggccaatattactgaagcggaatcagtgatgattactgccgatcagtataaaagtgaaactgatgctgatatgctgtcagtgctgactcttttatctgttaaagggcttaatccccttgcttactgcatcgtcgagattttgactgaccgttttgtcaccaatgcggagcgggcaggtgcaaaccaaatcatcggaacttcagaatttatcagccgggcgatgctgcagcattaccaagtcaagttacggccgtctaaacagcagaacggaatcaagctgacacttgatcagcatgtggagcttcttgctgttcctgacgaactaaagggagcggcttacaaaacctgtgttctctatttccttgatcacaacacaacaattataggcgtacaaaaagaggaggggccgatgatttcccctcctcttacatacaaggtgctcgaaacagatcaattccttgccatctagtgtaacagaacatcctccaattctttcacgagagaggcgccgatatccaaaaatgccggatcaatttccgcgtcccgcctttccggttcggaaaattgattaaacagtgattggaaaggccctccctcggcgtgatcgtcaacatccgcctgaaacacctgtctcagcataaacggcgttccgatccggacggccgcccctcgttcatcgagactgccctgtaccgcattgacgggaattcttaaaaataaatagccgtctctatcatcaattttataatcaaagtagccatgatcgtattcccagccgccgtttatcacataaccgagcggcttcatcacttgttccagttcttgaagcagaaaagactgcccatctatcgcggaaggtattggtatcatcagaatgccccttttttcacttatcctgtcccgccgaacaagacttcattcagaggcgcctacatggaaatcgttgtttctttcgcgcggccaacagaaaagaaagcgcattcaattaagaagtaaacagtcattgccgctgcaagccatacagctgaatcccaagacacataaacaaccgttgcatagagtcctaatttagtgaaaagagtatgggttcgttttaaatgcaaaatccgatgtaccgcatcggtaaaaagggcaagcggcaaaccaatgagaagaaaggcgtggatgaaaaaatgtgaaagcgtgccgccaaagcttgaagaaaactctgtatacacggcatcaaaggagataaggaaacttaaaatagctgcagaaaaaccggcaatgatgagatgtttaaccaattgtttcatgaacatcagcacctttctgattttataaaaagccgaccggcaaatgccagtcagctttctcacattaatcttccagacgtttttcaagctctgcttttttctcttcaaagccaggtttgccgagtaacgcaaacatattgactttatacgcttctacaccaggctggtcaaacggattgacgccaaggaggtaaccgctcatcgcgcaggctttttcgaagaaatatacaaggtatccaaaagtatatgcattcagctcaggaatgttaacgattaagttcggaacatttccgtctgtatgggcaagcattgtgccttggaatgctttcttgttaacgaaatcaacagttttaccggctaaatagttcaagccgtcaagatcgttatccgcttcctcaattgtcagttcatgtttaggtttctctacgttcaggaccgtttcgaataaatctctgcggccttcttgtacatactggcctaaagaatgaaggtctgttgaatagttcgctgaagaaggataaatgcccttctcatctttcccttcgctttctccgaacagctgcttccaccattccgcaaagtattgaagcgccggttcgtagttgatgagcatttcaattgttttgcccttattataaaggacattgcgaacaaccgcatattggtatgctgggttatcttccagttcagatgttgcaaaatctttgctcgcatccagggcgcctttcatcatgtcatcaatgttgacgccgctgacagcaatcggcaagaggcctacagctgttaaaactgaataacggccgccgacatcgtcaggaataacaaatgattcgaaaccttcttcgttagaaagcgtttttaatgcgccgcgctctttatcagttgttgcataaatccgcgctttcgcttcttctttaccgtatttctcttcaagaagcttgcggaaaatacggaaagcgattgcaggttcagttgttgtacctgatttagaaatcacattaatagagaagtcaacatcttcaagaagatccatgacgtctctcatataagatgaactgatgttgttcccgataaaaatgacttgcggattgccgcgttttgcttttggcaaagtgttataaaacgcgtgattcagcgcttcaatcgctgcccgcgctccaagataagaaccgccgatgccgacaacaagcaagacatcagagtcagatttgattttttccgcgctttttttgatgcgcgcgaattcttctttatcataatgttcagggaggtccacccagcctagaaaatcgctgcccgcgcctgttttttcatggatattatggtgtgctgtttttacaaagtcccgcaggtatgtaagttcatgttcgttgaagaaagtcaacgcttttgagtagtcaaagcgtacatgcgtcattgcttgtccctccataacggtataatgttttcatctttcactttatatgaacttatctgtgaaatcaagtcaagaagaaagggcggaatgactggattccgccctttgggtttatagagacgcgcgaaggatggcaagcacgtcatctttgttcagtttttggaagttgccgaagcccccgtgttccatttccttggctgcgatatcagcaatcagttcaagcttttcttctccaatattgtaatcagcaagacgagaaggtgcaccgaggcttgtccagaacgcagacagtttatcgattccttcaagcgcaatttctttatctgttttgccttcagtatcaatgtcaaacatgttgagcattaggtttttaaaacggcctacatttgtatcaagcgtgtatctcatccagtttgggaacagtatcgccaaaccgcccgcgtgcggaatatcatatacagctgaaacagcgtgttccattgtatgagaagcccagtcaccaaagtagcccatttggagcgtgccgtttaaagcaatagtaccagcgtacaaaatcgtttcacgaagtttgtagttttccagatcttcaagaagcttaggagctgtttcgatgaccgtctgcaaaacagcaaagcacattctatcctgaagcggcgtgttttcaacattatggaaatattgttcgaatacgtggctcatcatgtcaaccatgccgtatactgtttgattttctggaacggtgaacgtattttcagggtctaaaatagagaaacgcggatgagtgacattgctgccccatacaaatttctcgtttgtttcccagtttgtaatcacggaatctgggttcatttcagaccctgttgcagcaagagttaaaacagtgccaaacggcagcgcatcctccgctgttacttttttgctgaaaatatcccaagcgtcgccatcgtatttgacgccagctgcgattgcctttgtacagtcaatcacactgcctccgccgacagcaagcagaaaatcaatgtcatgctctctgcaaagtcctatgcctttttccactgttgcaagacgcgggttcggctctacacctgacagctcatgaacaacagcgccctcttcttttaaaatgcctgtgacttgatcataaaggccgttgcgtttaatgctgccgcccccgtaaacaagcagtacattcttgccgtattgtttgaattcttttcttaattgatcaagctgaccttttccaaaaatcagctttgtcggattataataagtgaaattttccatagtaaaacctccaaatgatgctggtaaaaaacagattttccattgtaacataagttgacaaaaagaaaaagggaagcagccaaacggctatttcccctttttttatagagatgctttcaaaattgaaagcacatcttctttgttgagtgatttaaattggccgaatgtaccgttagccattgccttgtcagcaattgtgtcaagctgctcatcattaatatcataatcagcaagacggttcggagcgccaaggcttgtccagaatgcggacagcttatcgataccttcaagggcaatttcttcatccgttttacctgcttcttcaacatcaaacacgcgaactgcaagctgtttcatgcgggcagggttttcagacaatgtgtgtctcatccagttcgggaacaaaattgccagtccgccggcatgcggaatatcataaacggctgatactgcatgttcaatattatgagtagcccaatcccctcttgcccccatagaaagcatgccgtttaatgcgattgttcctgtgtacaggatcgtctcacgcaattcgtaattttcgagatcattgatcagcttaggcgctgtttcaatgactgtacgcagaagtgattcacacatgcggtcctgatacggcgtgtttgatacatgatggaagtattgttcgaatacgtggctcatcatgtcaaccatcccgtagatcgtgtggtttttaggtactgtgaatgtattcaccggatcaagaatcgaaaatttagggaatacgagcgggctgccccagccgtatttttcttttgtttcccagtttgtaataacagatcctgagttcatttctgaaccagtcgcagcgagagtcaataccgttccgaatggcaaagcatcttttggctgatgctttttcgtaacgatatcccacgcatcaccatcatactttgctcctgcggcaatcgcttttgtacagtcgattacgcttccgcctccgacagccagcaagaaatcaatgttttgttctttacagatggcaacacctttattaacagtcgacacacgaggattcggttccacacctgctaattcatgcacggtcgctccggctttattcagctgttcaatcacttgatcatacaggccgctgcgtttaatgctgccgcctccgtacacaagcaatacgttttttccgtaaggtttgagttcctccggaagtctttccacttcgccgcgcccgaaaattaatttggtcggattccagtatgtaaagttttgcatgacatctcctccttagattttttattatgcagaatgtcctcaccacatgtaaagcaatcagctctcaccgatcagcataccagatggttttattttgcaagatgctgggaaagaagctgatataagcgagggcaggccagcctcatatggagaatgcatgtatagattctccaatatgtcacaatctataactgttttaataattcatggaggaggttgcaaaacatgagtaccattcaaagaatttgtcttgtattaaccatcattggcgccattaactggggactgatcggatttttccaatttgacttagtagcggctatcttcggcggccaagggtcagctctttcccgaatcatttacggacttgtcggaatcgccggcttaatcaacctcggtctgctatttaagccaaacgaggaaagatcacgtgaagaagcagcaaatcctgaaatgcgataggatatcaatcacgctgaaataggattttgtattaaatcaaaagcaccgaacattcctgtccggtgctttttttcatgcttattttttgataaggtctttgcggttggacatttcgatccactcttcaagcttatcttttaatgtgttgaaaccttgtggtgtagaagcttcttcgcttacttgagcagctttaggttttcttggtttgctttcttttttctcaggcgcagcttgtgtcgcacgaattgaaaggctgattttgcctttttcttcatcaacagcaagtacttttacttgtacttcgtcgccaactgaaaggtgctcgttgatatcttttacgaaaccgtgagtcacttcagaaatgtgtactaaaccttgagtttcttcatctaatgcaacaaacgcaccatacgcttgtaatcctgtaactttaccagtgtaaacactgcccacttcaaattttgctgccattcataacaactcctaagttaaattaaatatctgtttatacgcaatttaaaattatatcacacatgtcttatttccgcaaagaaaactttttcataaaaaaatcaggtttatgcacagcaaaaagggggtaaactgaaaataccaaaggctttctagtattcccccttttattggatgcgaacaaaaggttcgtatctttttttatattgttttgtgcaggaagcgtttcattctgactaacgcttcttgaagctgttcaatcgaggttgcgtatgaacaacggatatatccctcaccgctcggaccaaacacacttccaggaacaacggccactttttcttgcgtcagaagctcctcggcaaactgttctgaactcatccccgtgcttttaattgatggaaaagcatagaaagcgccgcccggatgatgacagctgagaccgatttcattgagcgattctacaaacagattccgtcttcttcgatagctttttttcattttttctacgtcttccatgccgttcttcaggccttcaagggcggcaaactgcgccattgcgggcgcacacatcatcgcatattgatgaattttaagcatggcatcccgaagcaaggatggtgccgcggcaaaaccgagcctccagcccgtcattgcaaatgcttttgaaaagcctgagatgactaccgtccgttccttcattcccggtaatgccgctatacttgtaaattcctcatcatatgtcagctccgcgtagatctcgtcggctaagacgatgacatcatgttttttggcaaactcagcaatctcattcagctcttccttcgaataaaccgaacctgtcggattcgatggtgagcagatgagaatggcctttgttttttcagtgactgccgcttcaaaatcagcagccgttgctttaaatcctttgtctgccgttgtatgaacgtgaaccgggataccgcctgccaaagaaacaagcgcatcatacgccacaaaacacggctcaggaatgatgacttcctcacctggattcacaatggcgcggatcgcaatatccaaagcctgacttgcccccactgtcacaatcagctcattatctggcgagtagctaagatcaaacctgttgctcaaataacggctgatttcctcccgcaatgagtataaacccgcattggccgtgtatgacgtatatccttgttcaagagagagaatgcttgcttcgcggacattccacgcggtaacaaaatcaggctcgccgacgcctaaagaaatgacgccttccatcgttgccgccaaatcaaagaatttgcggatgccggatggttttatttgttgtacatagtctgataaatacgaagtcatttacggtgacaccacgattcttttgtcgtcgtctcctgtttcaaacactttgccgtcatgcttgtattttttcaggataaaatgggttgtcgtagatacaactgaatcaagcgttgagagtttatccgaaacaaaacgcgctacgtcagacatcgaattgccgcgaatcacgacagacaaatcgtatacgcctgacatcaggtaaactgattcaacctcttggaatcggtaaatccgttccgccacttcatcaaaaccgacgccccgcttcggcgttactttgacgtcgatcatggccgtaacgccctcatgtccgtctacttttcgccaatcaatcatagcggaataatcgataataaccttttctttttccagtttgtcaataattgtttttacttcatttacagggatgcccgccatctttgcgattgtttctaaatcggcgcggctgttttcgtctaaaatttctaatatttctgtttctttttctgtcagtttcatttgattcacacctttgcaatgtcaagaaatctcatgacattatatcacgttttttgacgaatgctaagaaaaaacgaggagaaacttccgctagaatttacaatttcagggcataatacaaccatcaaaaaaagggagtgacacagaatggaggcggtttcaccaataaggcggtttacggtcgatggagtcaatgtatactacgaacattatcaaaatcccggcaggcaaacgctggtttgcgtacacggttttttatcatctgcattcagcttcagaaaagtaattcctctccttcgggacaagtacgacatcatcgcgcttgatttgcctcctttcggccaatctgaaaaatcaagaacgtttatctatacctatcaaaaccttgctaagcttgtcattgggattttggagcacttgcaagtgaaacaggctgtgcttgtcgggcattctatgggcgggcagatatcgctgtctgctgctctccaaaaacctgagcttttttcaaaggttgtgctgctttgcagttcagggtatttaaaacgttcacacccgacgatcattttcgggacccatatcccgtattttcatctttatatcaaacgctggctctcgaaagaaggcgtgatgaaaaatttattaaatgtggtgcatgacaaatcgctgattgatgaggagatgattgacggctatggcagaccgtttcaggacgagcagattttcaaagccatgacaaggtttatccgccacagagaaggagatttagaacccgagcaattgaagaaaatgaacaagcctgctctattgatttggggcgaggaggatcgaattgtcccaatggagatcggtaaacggctgcacgcagatttgcctaattccgtgctgtactcacttggccagaccggacatctggtgcctgaagaacggcctgaacttgtttctgaacacattgctgattttatcaattaaaaaaaccggtgctgaaccggtttttttaaggcgtgcaggagctgctgtttttaatgaataaaagctggccagccacttcccggcagctgtcgatcggcagcgtttgttcaaaagaagtttcaaatatttgctgaatgcttttcgccagcacgtcaggatcgtcttcatcatagactgcctgcacgacatcaacagcctccgtttcgtaaaactcttctccatatttaaacgggtcccatttggcaatgatcttaatcatttccctgaccgcttgactttcttccatattcatcaccgcttataataaaatttgcagttctatcttatcatagtgaagcttagaagaataaacatacatgagggggtaacagaatgaactttgataaacgagaagaacgccttggcacccaatcggtcaaatgggacaaaacaggcgaattatttggcgtgacagacgcactcccgatgtgggtggcggatatggattttcgcgcgccagaagcgataactgaagcgttaaaagagcgtcttgaccacggtatttttggttatacaactccagatcaaaaaacgagggatgctgtgtgcggatggatgcaaaacaggcacggctggaaggtgaatccggaaagcatcacattcagccccggcgttgtaacggctttgagcatggcggtacaagcttttacggagccgggcgatcaagtagttgttcagcctccagtttatacgcctttttaccatatggtggagaaaaacggccggcacattttacataatccgctgctagaaaaagacggcgcatatgcaatggattttgaagatttggagacgaagcttagtgacccaagtgttacattgtttattttatgcaatcctcataacccttctgggcgttcatggggccgggaagacttactgaagctaggcgaattgtgccttgagcatggcgtcacagttgtatcggatgaaatccattctgatttaatgctgtacggacacatacacacgccgttcgcttcgctctctgacgatttcgctgatatttctgtgacatgtgctgctccaagcaaaacatttaatatcgccggattgcaggcttcagcaatcattattccggatcgcctgaagcgcgccaagttttccgcaagccttcagcgcaatggtttaggcggactgaacgcgtttgccgtcactgcaatcgaagccgcgtattcaaaagggggaccgtggcttgatggattgatctcttacattgagagaaacatgaacgaagcggaagcctttttgagcaccgagctgccaaaggtcaaaatgatgaagccggatgcatcatacttgatttggctcgacttcagcgcttacggcttgtccgatgcagagcttcagcaaagaatgctaaaaaaaggaaaagttattttagagcccgggacgaaatacgggcctggcggagaaggatttatgcgcctgaacgcaggatgctctcttgcaaccctgcaggacggcctgcgccgcatcaaagccgcattatcgtaaatatagctgttaaacgcctttacgtcttcatttgtaaaggcgttcttaataaaggaattttatattttacttctaatatttagtgttataatagattcatattttatacgaaaggatttcacacgaatggaaattctaaaagactatcttctgcacatctgctttattttgtttcctattcttctttaccaagtgttttggcttggaaaacctgcgattcttgtgccaaaaataaacagcggtttggtcacgctcttcgcctgcggcgcctccgttttatgcattattttcccgattcatgaaatggactacatacaatacggccttcagatgattcccgttatcatttgtttattttacattagtaccgcttccggacttacagtcgccgcatctgtcctatgttttgaactgcttttttacgaaccttccgcaatgtttgttttcactttgctgccttttcttatcattatcccaatcttatttcagaaaaaatggccattcatgtccaaagcgaaaaaactgctgctgtctttattgatcagctgcgtggagattttcctatttttcgcctcaagctggattctttccgccttgaatattttaaattttcaaaaatcaggaattttcgtttacgaggcggcagtctcagggcttttccgctccagtgttcttctattaagcatctatattatcgaaagcatcgccgaaaatatcgccctgcgctcacagcttatccattctgaaaaaatgacgattgtgagtgaactggcagcgagcgtcgctcatgaggtcaggaatccgctgacagttgtccgcgggtttgtccagctgctttttaatgatgaaaccttacaaaacaagtcgagtgcagattacaaaaagcttgtactgtcagagcttgaccgggcgcaaggcattattacaaactatctcgatatggccaaacagcaattatacgaaaaagaggtttttgacctatctgcccttatcaaagagacaagctcccttatggtgtcgtacgccaattacaagtcagtaaccgtcgaggctgaaacagaaccggaccttttgatatacggagacgcaacaaagctgaagcaggctgtcatcaacctgatgaaaaacagtattgaagcggttcctcacggtaaggggatgatccacatatcagccaaaagaaacggccatacgatcatgatcaacatcacagacaatggggtcgggatgacagaccatcaaatgcaaaaactcggcgaaccttattattccttaaaaacgaacggaacgggactcggcctcaccgtaaccttttccattattgaacatcatcacgggaccatttcatttaacagcagcttccaaaaaggcactacggtgaccattaagcttcccgctgatcttcctcactagcaaatcgattggaactttaatagaataaatgcgaggtgatgacagatgagcacgtttgagacaggctctatcgttaaaggattttacaaaacaggtgtatacataggagaaatcacggcttgcaggccgcagcattatttagtgaaagtgaaagcggttcttacccatcccgctcaaggagaccttcatcatccaaaacaggcggatgtgccattttttcatgagagaaaagcgctcgcacatggtgaacagaccaatatcccccaccatatggtgaagccttatgacggtgaagtgccggattataccgaatctctgcgggaggcgacagcacagctgagagccaaattggatgaggatggttcggagtgggcaaaacgctcccttcataatctggacattttagaaaaagaatattttaacctgccataacccagtctgacaaaagattgggttttttacgtcgcgcgcttcaacagttcggttaaatcgattctctcgccgattgtgggcggttttggcttttcgagatactgcttatcctgctcaacaagcttaaaaagtttatatgctgtaagagcatcatcaagcgctttatgatgggtgccggttccggaatctccatactcttcggcagctttccataaacccgtcaatgtccggtctccaaaaaagtttttgtattcaagcgataaatctctcatttctcccttaaacgggaaagggatatggttaaacatacagttttgcttcagcactttcatatccatgtttccccacgtaataattgtgctgtttttctcaggatccagctcgtttagtttacggatgaaatcctcgaatctcattccttcgtctacctgtttttgggttatttttaaaaatgatttgcagcgtttcgtaagcttcgggaactttttcggtctaacatagctagaaaacgtctcaaccacttcatcatcaatcgactttacaattccggcttcaatgatttccgggaagaagttttgaggactgtactttccgtcaggcattgtaaattcgaaatcaataatgagtaagctgtttgtcgtcacctttttacacctgcctttcctccgatcagaaaatgctatctttatagtatatcaattccccttctcgacatttcttcattttctaaaaataatgaattttcccagccgcttcgtttcttttaaattgtgaatcgtttctttataattagtaaggaacccgaaataataagaaggtgatgttatttctatccgtaagaaaaactttgtcattgtgtggctggcgaacttttttgtctccgctagcacaacgatgatcgttccttttctctccttatacattgagacgctcagctctttttcaaacggctttgtgcaaaggtggagcggctatgtgttcggcattacatttctcatggcgttcttggtatccccgttttggggacggttcggagacaaacgcggatataagaaaatccttatggcaaccggaacgggcattgccctcagcattttcttcatgggctttgttacatcggtgtaccaattgttttttctgcgtatggcaatgggtcttgtaaccggattcatcccgacatctcttgcgatgatttcggcacagactccgaagagctcagccggcaaaacactcggcacgctgcaaatggggcaagtgtccggaagcttgttcggcccgcttttgggaggcatgcttgctgatcgtttcggctttacgtataccttttttatcacatcctttgtgattttctcgtctgttcttctcgtgttatttggtgtcaaagaaaagcctcttgcagagaaaacagccaaacgtacgtcttactcgaggaaagaagtgctatcctatatttttcaccagccggcgctgtgggtcatgatgctgttaaccatgctgattcaaacaggcaatttcagtatccagcccctgctcgctttatatgtaaatgagctgcatggacctgtcaatcttgcctttttctccggcatggcattttcagcaacggggctcggaagtttgctgctggctagaaaatggggtgatctgggcgaccgctacggccaccgccgcattttaatcggacttttgctcgccgcctctttcttttttattccgcaggcgctcgcgtcctcactcagcgtgctccttgttttcagatttttattcgggatggcgatgggcggtttgctgccatgcattacggcagcgatccgcgttcaggctcccggcagcattcaaggtgaagttctcggctacaatgtcagctttcgctttttaggaaacgtgctcgggcctctgctcggcggaatcatatcgagccattttaccatttcggccaccttttacgtcacggcgtttctctttttcgccggcgcctgcatgctttggatcatgcagaaacttcggaaagattcttatgccaaagcaagctgattccgagaaaaaactgaggaatcttctaaatttaaccttctcgtaatctcaaaagaatggtacgatatggctagaatttaggagaaaagagagtgaccatgttacgaaaaataatcggatggattttgctcctttgcataatcccattgtttgcatttacagttatcgcttccggaaaagaagtaaaacaaatgaagtccctggatcaggtgcttgataaaaatattaatctgaaagatatcagccttgttcagaacagctacatgtatgacagggacggctcccttgtctcggaaatcgtcagcgaccacgaaaaccgtgtgctcgttccatttaacaagattcccgaggaagtcaaacagattttcttaacatctgaggaccgccatttttacgagcataaaggctttgactttatgggaatggtgcgggctactgcttctaacgtaaaagacaagaaaattgaccagggtgccagcaccatcacacagcagctttcaagaaacttatatttgagccacgaacgctccttcagccgcaagctgacagagctcgcgtattcctatcagctggagaaaaaatatacgaaaaatgaaattcttgaagcttacttaaataccatttattttaacaatggtgtttatggcgtcggttcagcagctcaattctatttcagcaaaccgctgaaatctctcacagtgggagaaatggcttttatctgtgctatacctaataaccctacattatatgatcctctcaagcattttgactacacgaaaagccgtcaagaacgtttgcttaaagggctaaaagatgccggggtcattacggacaaagagctgaaaaaagccgtaaaacaaaaaatcaaactggatgttgaaaaaagagaagacaaatatcctgactacgtttcctacgtcaatgatgaattcactcagctggtgtctgaatcagaaggctttgataaacgccttcaaaaagcatcaggaaaacaaaaagaaaagatcgagaacgagctgtccgcaagagtcagcactctgatgaaagacggcgtgaaaatttatactgcacttgatccgtacatgcaaaatcaagttgtggcacaaatgaattccaagctcccgtatgcggacgtacagggcggagcggctgtgattaatcaccagacgcatcaaatcatcgctctatccggcgggaaaaactatcaaaaatatgactttaaccgcgcctaccaggcgtacaggcagccgggttcatccattaagccgcttcttgattacggcccttatattgaacagaccggcgcgacaacaagcagcaccattgatgccagcaagttttgcagcaaagactactgtccgcaaaactacaataaccgcacttacggcacagtgacgcttgatacggcgtttaaaaattcatataataccccggctattagaatgctcgaccgcgtcggcatccaaaaggcattcagttatattgagccgtatcattttgccaaacttgtcgacagtgactatcttcttccggcggcgcttggcggatttacaaacggcatgacgcctcttgagatgacaaaggcttatacgacattcggaaacagcggaagctatacgccgagccatgcgattacaaaggtgacagaccttaaaggaaaaacactttataaatggaatgataaagcgactcaaatattcagcgtccgcacgaacatgcagctgaaaaaactgatgtcttccgttgtgaaaagcggaacagggaaaaaagcatatttcaatgcgccttacatcggcggtaaaaccggaacatcaaatgattatcacgatatgtggtttgtcggcctgactgatacgtatacaatgggtgtctgggtcggaaaggatacaccgaccagcgttgaatatcttcacagcatcagccctcagctttccatctggaaaggaacgctgcaagcggcttattaaaggatcggaggggatatggagtgacttcagaacaaattccaaatcgcgttttgctgtttgacggtgtctgcaatttatgcaatggagccgtgcagtttatcattaaacgtgatccggacggattgatttctttcacatcgctgcagtcggaaacaggacagagcctgctgaaaaaaagcgggcttccgactgatcggtttgacagctttgtctttattgaagacggccaagtgtacacaaagtcaactgcagccattaaggttttcaggcatctgcgaggcccatggcggctcttcgtcctgtttttcgcagtgccgaagcctgtcagagatatggtctattcttttattgccaacaaccgctataagtggtttggcaaaaaaaatgaatgtatgctcccctccccttctattaaaaaaagatttttaccgtaaataaaaaatggctaggaagctagccaacacagattgttgacaaaatcctaaaacggcttcgttttaggattttgtcatcttttcagcgtgattgaaaacctttgaagtcgacgaagagcgagcattggatgtgaaacggcaggaacctgagaatctagccgccgttttattgcgtacagagcacgaagcgcaaatctgaccactaaacgctgaaatggctagcttacacaggtaagctagccattatgctattataaagcttgataaatatgaacagaataccgataacaaaggtaaaccaaaacagcagttccaatagaatgaatccaactaatgacatgagagaaagcgtcgaataaatccggtacacggtaaacacaaagtaagcgagcgtgacgaccgcaaaccagatcacaatccaaatgacattttgcaagagcacaaaggataaaatcccgccgcccaaataaatcatggaacccattctgagttttttcaggttgttcccttccggatcattagcaaaaaacagcaatgacagctcggtcacggtatttgcaattaatttcagagcggacagaaccataaaatataaaagtgcaaaggcagcaaataacgcaagcctgattcctttctctgaaaaataatcgagcattccatcatacattccaaatgaagacagcatcttcaacgcataaagtgaagttgagatggataaggacgaactaaaaagcaggatcgcaatcagcggaaaatatcctgtcaaataagtatttttcatataaaaaagtccctttctataatctacctcatttattatggaggacttaaaacacattgacaagataaattattccattttttctcctttttacgaattacggtcccaaatcttcacaaagcagcattttgagagtaaagtagtacgcaggaatcataaaacgtaaggaagttttatatgaaaaaaacattaaaactgcaaaccagactcaccatatttgtttgtatcgttgtattaatcgcattgctcattacgttttttacagtcggtgcccaaaccaccaaacgaattagagatcaggaaaaggccactgcgctgcagactgctgaaatggtagctgaggcgccgatgacagccgctgctttagaaagcggaaaaaaacaaaaggaactgcagagctacacaaagcgggttcagaaaattaccggcacggaatttgttgtcgtcatggatatgaacggtatccgcaaaacccatcctgacccgagcaaaatcggaaaaaaattcagaggcggtgatgagtccgaggtattaaaagggcatgtccatatcagcacagcctctggcacgctcgggaaatcgcagagagcgttcgtccctgtctacgcggagaatgggaaacaagtcggtgcagtcgcggtcggcatcaccgtaaatgaaattgatgaagtgatcagccatagcttacggccgctttactttattatttgcgtcagcatcttcgtcggtgtgatcggagccgttatcgtcgcccgtacagtgaaaaatatcatgtacggacttgaaccttatgaaattgcgactctgcttgaagaacggagcgcgatgctggaatcgacgaaggaaggaatactcgctgtcgatgaacatggcaaaattaaacttgccaacgcggaagcaaaacgcctattcgtcaaaatgggcatcaacacaaatcccattgatcaggatgtagatgacatcttgccgaaaagccgcttgaaaaaggtcattgagacaaaaaaacctcttcaagacagagacgtccgcattaacgggctggagcttgtgtttaatgaagttcctatccagctgaaaggacaaactgtcggagcgattgcaacattccgcgacaagaccgaggtaaaacatttagctgaacagctttccggtgttaaaatgtatgcaaacgcactgagagcgcagtctcatgaatttatgaacaaactgcatgttatattaggtctcgtccagctgaaagagtatgatgatcttggagattatattaaagatatagccatacagcaaaaatcagaaacaagtgaaattataaatgatgtcaaaagctccgtactggccggttttctgctcggaaagcaaagctttatacgtgagcagggcgcaaatcttgatattgaatgcaacggtgtcatcccgaacgcggcagacccttctgtcatccatgaacttattacaatcatcggaaatctcatcaacaatggcttagacgccgttgccgatatgccgaaaaaacaaatcaccatgtccatgcgcttccataacagcatacttgatattgaaattaccgatactggagcaggcatgtctgaagaagaccaagccaaagtatttgaacaaggctattcaacaaagggcaaaaaccggggattcggcctttatttcacacagcaaagcatcgaaaatttaaaaggccaaatgatcctcacaagcgaaaagaatgaaggaacgacattcagtattcgcatcccgtacgaaccgaaggaggaaaatcatgattaatgtactaatagttgaagatgaccccatggtgggtgaattaaataaacgatacttaagccaaatagatggctttcagctgaaaggcatcgcttcttcctttcaaagcgctctgcatattttaggcgagcaccatatcgacctcattttgcttgatatttatatgccgggaaaaaacgggctggaactgctgacggaattgagagcccaaaatgaagcggttgacgtgattgtcatctcagcggccagcgagcttgacgtaatcaagaaaacacttcggtacggagctgtcgattatttaatcaaaccgtttgaatttgaacgtttccaaacggctctgtctgattacagacgaaaacaaaaggtgtattcaacccatcgcaacatgagccaaaaagaactggacgccgagctttttcaaaagaaagaagcaacagaaaaagtgcagcttcctaaaggcctgacaaaaagcacgctgaagctgatctggtccagtatccagtcatttgaaaatgaatcttttacgacagaagacttggcaaagcacacagaaatctctcaagtatccatacgaaaatacttaaagtttcttgaagatatacaagttctgaatgtagaaatggcgtacggaacgatcggaagacctgtgtttcagtacaacgtaaacaacagtaaccttaacggaataaagcaatatctataagaaaacgcactgcttgctttgagcagtgcgtttttctgtcatatctcttgccaagatgcttgattctattgttgataagttatacaagaataacaaagggctttcacatttttaagcaaataattctaaaaatagatactttttaaaaaattatgcgaaattctatttatttcttattagttaaatgataaattatgattggttagttgatcccgaaaaactaagtcataagtcttacttcagaaaacgatgtcacggttttccgcccggaacgccttccgcatccttctcttccccgcctttcgaaggaaatactcacaccacgcttattcagggaagaatagaactgtctcagcgcattccatttgttattatcagaaaattttatcgattctaagaaattgttcaggacagcccatcacatgactggccggatcagctttgaaccaaatttttctggggggttatatcttgaataaacgaaaaatcggattggcgatgtcacttgtgatcgcagcaggcaccatattaggagcatgcggaaacagcgaaaaaagcagcggctcaggcgaaggcaaaaacaaattcagtgtggcgatggttactgacgtaggcggagtggatgacaaatccttcaaccaatcagcctgggaaggcatccaagcctttgggaaagagaatgggctgaaaaaaggcaaaaacggttacgactatcttcaatccaaatcagatgcagactatacaacgaacttaaataaattggcgcgtgagaattttgacttaatttacggcgtcggctacttaatggaggattcaatcagcgaaattgctgaccagcgcaaaaatacaaactttgcgattatagatgctgttgtcgataaagacaacgtcgcaagtattacgtttaaagagcaggaaggctcatttctcgtcggagtggccgcagccctatcaagcaaatcaggaaaaatcggctttgtaggcggcatggaatcagagttaatcaaaaaattcgaggtcggcttccgtgccggcgtacaagcagttaaccctaaagccgttgtagaagtgaaatacgcaggggggttcgataaagccgatgtcggcaaagcaaccgccgaaagcatgtataaatcaggcgtagatgttatttatcactctgcgggcgccactggcacaggcgtctttactgaagcgaaaaacctgaaaaaagaagatccaaaacgcgatgtctgggtcatcggtgtcgataaagaccaatacgcagaaggccaggtagaaggaacagatgataacgtcaccctcacttccatggtgaaaaaagtagatacagtcgttgaagatgtaacgaaaaaagcgagtgacggaaagttcccgggcggcgaaacacttacctacgggcttgatcaagacggagtcggcatttctccatctaaacaaaatctatcggatgatgtgatcaaagcggtcgataaatggaagaaaaaaatcatcgacggattggaaatcccggcaactgagaaagagctgaaaaccttcaaagctgaataagaatcgcagggataaggaggtcgagcccttatcccttgtttttcttttattttgaaataaaggagcggtcaatcaatggaatatgtcattgaaatgctcaatatccgcaaggcgtttccaggtatcgtcgccaatgacaatatcaatcttcaagtcaaaaaaggcgaaatacacgcgttgctcggtgaaaacggagcggggaaatcaacgttgatgaatgtccttttcgggctgtatcagccggagcggggtgaaattcgggtgcgcggcgagaaggtgcacatcaacagcccgaacaaagcgaatgaacttggaattggaatggtgcaccagcactttatgcttgttgacacctttacagttgctgaaaatattattctcgggaaggagccaaagaagtttggcagaattgaccggaagcgtgctggccaagaggtgcaggacatttccgatcgatacggcctgcagatccatcctgaagcaaaagcagctgacatatcagtcggtatgcagcagcgcgcagaaatattaaaaaccctctaccgcggtgccgacattctgatttttgatgaaccgacggctgttttgacgcctcatgaaattaaggaactgatgcaaattatgaagaacctggtcaaagaagggaagtccatcatcttaatcacccataagctgaaagagattatggagatttgtgaccgcgttacggttatccgtaaaggaaaaggcatcaaaacccttgatgtccgtgatacaaaccaagacgaactcgccagtctaatggtcggccgcgaggtatcgttcaaaactgaaaagagagctgctcagccgggagcggaagtgcttgcgattgacggcataactgtaaaggatacccgcggaatagagacagtcagagatttgtctctttctgtcaaagcgggagaaatagtcggcatagcaggcgtcgacggaaacgggcaatcagagctgatcgaagcggtgacaggactccgcaaaacagattcaggaacaatcaccttaaacggaaaacagatccaaaacctgacgccaagaaaaatcactgaatccgggatcgggcatattcctcaggatcgccataaacacggtctcgtccttgattttccaatcggagagaatatcctgctgcaaagctattacaaaaagccgtattcagcattgggcgttttacataaaggcgaaatgtacaaaaaagcacgcagcctgatcagcgagtacgacgtcagaacgccggatgaatatacacacgctcgggcattgtcaggcggaaaccagcaaaaagcgattatcgggcgggaagtagaccgaaatcctgatttattaattgccgcccagccgactcgcggccttgatgtcggagcgattgaatttgtccataaaaagctcattgagcagcgtgatgccgggaaagccgttcttctcctctcgtttgagcttgaagaaattatgaatctcagtgacagaatcgccgttatttttgaaggacgcattatcgccagcgttaatccgcaggaaaccactgaacaggagcttggtctcttgatggcaggaagcacgcaaaaggaagcggggaaagcaaatggttaaacgactctctcatttactcgtgccgctcatcgcaatcatccttggtcttgcggccggcgcgttgattatgcttgtgagcggctacagtgtggctagcggatattcggctttgtggaatgggatattcggagaaatctattatgtcggagaaacaatccggcaaattacgccttatattttatccggattggctgtcgcctttgcattccgaaccggactctttaatatcggcgtcgagggacagctgctcgtcggctggacagcagcggtttgggtcggtacggcgtttgacggaccggcatatattcacttgccgctcgcattgattacagcggcagctgcaggaggattatgggggtttattcccggcattttgaaagcgcgattttacgttcatgaagtcattgtcaccattatgatgaattatatcgcgctgcacatgaccaattacatcatttcaaacgtcttgacagatcatcaggacaagacggggaaaattcacgaatccgcctccctccgctctccttttcttgaacagatcaccgattactcacggctgcatttgggaatcatcgttgcccttctcgcagcagttatcatgtggtttatcatcaacaaaactacaaaaggatttgagctccgggcggtcgggtttaaccagcacgcttcccagtatgccggcatgagcgtgcggaagaatatcatgacctccatgcttatctccggcgcttttgcaggccttgccggagccatggagggcctagggacattcgaatacgcagcagtgaaaggcgcatttaccggcgtaggctttgacggtatcgctgtcgctcttctcgggggaaacacagccgtaggcgttgtactggcagcatgcctgcttggcgggctgaaaatcggcgcattaaatatgccgattgaatcaggcgttccatcagaggtcgttgatattgtgattgctattattattctatttgtggcttcaagctatgcgattcgtttcgtcatgggcaaattgaagaaaaagggggcgaactaagtggacattgtgcagattttatctatcattgtccctgccacactcgtctatgcggccccgcttattttaactgctctcggcggcgtgttttccgagagatcaggtgtggtgaatatcggcttagaaggcctcatgattatcggggcgttcaccagcgtgttatttaatttattttttggtccggaattaggtgccgccgcaccttggctttcgctccttgccgccatggcagcaggcgccctgttttcactgattcacgcggcagcggcgatttcgtttcgcgccgaccagacagtcagcggtgtcgccattaacatgctggcgcttggggcaactttatttatcgtcaaactgatctacggcaaagcgcagacagacaaaattccagagcctttttataagacgaaaatccccggtttgggcgatattcccgtcttgggaaaaatcttcttttcggatgtctattatacgtctattcttgcaatagcacttgcctttatttcctggtttatcttattcaaaacgccgttcggccttcgtatccgttctgtcggcgagcatccgatggcggccgatacgatgggaatcaacgtatataaaatgcgctacatcggcgtgatgatcagcggattgttcggcggtctcggcggcggcgtatatgcctccacaattgcgcttgatttcacgcactctaccatctccgggcaaggttttatcgccctggcagcgcttgtattcggaaaatggcatccaatcggagcactgggggccgccctgtttttcggattcgcccaaagcttaagcatcattggatcactgctccctctttttaaagacataccaaatgtgtatatgctgatggctccttatgtcttaacgattctcgctttaaccggctttatcgggcgggcagatgcgccaaaagccaatggcgtgccttatattaaaggaaaaagataaaacattctcccctgggaagacgattctcaggggtttttttctaatccaaaagacccccttaatttaattgtttattagttttttaacttaaaaaaatatgaagtgttaacgctttcttgtagactgtaacaaacaatacatgggggtgtatgacatgggagcaattccaaaaacggggacaatttcacctgagcaaaaagactcacaggggaaaaacctgtttcaaaaaatctggtcttgggaaatcggtgtgattcctctgcctttatacacagtattagctgttattattattcttgcagcctattacaatgagctgccggcaaatatgcttggcgggtttgccatcattatgattcttggtgtgtttctcggagacataggccaacgcataccgatattgaaggatattggcggccctgctattttatctttgtttgttccttcatttttagtcttttacaatgtactgaattcaacatctttagacgctgtaaccaacttgatgaaaacgtctaacttcctttatttctatatcgcttgccttgttgtgggaagtatcctcggtatgaacagaattgttttaatacaggggtttatcagaatgttcgttccactggttgcaggaacgatcgcggccgttgcagccggcatccttgtcggatttatttttggctatagtgcctatgattcctttttctttgttgttgtcccgattattgccgggggaataggcgaaggaattttgccgctttcaatcgcctactcacaaatactgggctcatctgctgatgtatttgtgtctcagctggttccagccgcaattataggaaacgtttttgctatcatatgtgcagccttaatgaaaaagcttggcgataagcgtccagatctaaatgggaacggacgtctcgtaaaatctaaaaaagcaaatgagattttcaatcaaaaagaagccgaagcaaaaattgattttaaactaatgggagcgggagttctgctcgcgtgtacattctttatttttggcgggttattggagaaattcatcttcatcccgggcgcgatcttaatgattatttcagctgcggctgtcaagtatgcaaatattcttccgaaaaaaatggaagaaggcgcttaccagctttataagtttatttcttcaagctttacatggccgctgatggtcggtctcggcatcctctttattccgttggatgacgtagcgtctgtgatttctataccgtttgtcatcatctgtatttcagttgttatcgcgatgattggttctggatatttcgtaggcaagctgatgaacatgtatccggttgaatccgcaatcgttacctgctgccacagcggtctcggcggaacgggtgatgttgccattttatcggcatcaggaagaatgggccttatgccgtttgcccaaatttcaacccgtctcggcggtgcaggcacagttatttgcgcgacagtgctgcttcgttttttcacttcataaacagaaagagttccgttttatgcggaactctttttttatttattcacaatccgaatatactctcggggaccaaacggcagatcctttgattccatctcactcattctggctgacaggtggtgctccagtaaatacagctcccactcatcactagccgccacaccgctgcgcccgtcatattgattcaacatgaatgcccctgcaaatactgagcagaataaacctgagcacatcacgacttttcttttcacatgaccagctcctttccttcagcttgatcaggattgattttaaatatacaaataacctcttttttgttagacttattttgaggtcaaaagaactcataaaaacccattacagcagttcgaagcgtggcagcttgcagaaaagtgcgatataatttggactaggtcgtttgaccgtatatttcatacatagcgcatttttcaattgagaacgagaaaaggaggtcttatctttgcagctcttacatcttgctattttatcgccttttttatttgcttttatcattcccttcttggcaaaatacgcaaaaagagtgcatacgggctggtttgtgttgatcctgcccgtcttgctgtttatatactttctcccaatgatcaggatgacacaatctggagaaacacttcgatcggtattagagtggattccgtcactcggcattaactttaccgtttatatagacggcctcgggttattattcgctttactgatcacaggcattggctctttggtcactctttacagcattttttatttatcgaaagaaaaagaacagcttgggcccttttatgtctacttattgatgttcatgggcgccatgctcggtgtcgttctagtagacaatgtcatggttctctacatgttctgggagcttacaagcctttcatcctttttgctgatcggctattggtataagcgagaaaagtcgcgctatggcgcagccaaatcacttttgattacggtcagcggcgggctgtgcatgctcggcggatttattctcctttatttgataacggattccttcagtattagagagatggttcaccaggttcaattaattgccggccacgaattgtttatcccggctatgattctcattttattaggggcttttacgaaatcagcgcaatttcctttttacatctggctccctgacgcgatggaagctccgacgcctgtcagcgcttatctccattcagctactatggtaaaagccggcatttatgtgattgcgagattcagccctattttcgccttttcagctcagtggttttggatcgtgtccctcgttggcctctttacgatggtttggggttcattccatgccgtgaaacaaactgatttaaaatcgattttggcgttttcaaccgtcagccagctcggcatgatcatctccatgctcggagtcagtgctgcggcccttcattacggacatacagaatattatacagttgccgctatggctgccattttccatttgatcaaccacgcaacctttaaaggaagcttgtttatggcagtcgggattatcgatcacgaaacaggcacacgggatatccggaagctaggcggcctgatggcgattatgccgattacatttaccatttccttaatcgggacattttcaatggccggcttaccgccgtttaacggatttttgagtaaagaaatgtttttcacaagcatgcttcgcgtgacacattttgacctgttcaccgtgcagacatggggcgttctgttccctcttttcgcctggatcggaagtgtatttacgtttatctacagcatgaaattgctgtttaaaacattcagaggaaattaccagcctgagcagcttgaaaaaccggctcacgaggcgcctgtcggcatgctcgtaccaccggtcattcttgtcgctttggctgtcagtctcttctttttcccgaatatattgtcgtacagcctgatagagcctgcgatgaactcaatctatccgacactgcttgccggccatgagaaattccacgttcacatttcacagtggcatggggttacaacggaattgctcatgactgcgggtattgttgtgatcggaacaattggttatttgtcgctgaataagtggaaaggaatctataaactgtttccttcgaaactcacactcaatcggttatacgataagcttttgactctgatggagaaaggctcttaccgggtcacaaaacaatatatgaccgggtttttaagagattatttgctgtatatcttcgctggtttcatcattctgataggcggagcttttgccattaaaggcggattttcatttaaaacggaaggcatggctaaaatcggtgtatacgaaatcattttgacgcttgtcatgatcagcgccacagtggcgactgtttttgctaggtcaagactgacggcgatcattgcactcggtgttgtcggttatacgcttgcattgttttttgtcattttcagagcgccggatttggcattgacccagctcgtcattgaaacgatttctgtggcactgtttctgctttgcttctaccatttgccgaaactgaggctgaaaacaaaaacgagaacgttccggatgacgaattttatcatttctttaggcgtcggtattattgttactctgcttggtatcgcatcctcaagccagcggacaaaagacagcattgcgtccttctttgtcaaacacagccacgatctcggcggaggggataatgtcgtcaatgtcattcttgttgatttcaggggatttgatacaatgtttgaaatcacggtattaacgatagccgctctcggcatttacagcatgattaaaacaaaagtaaaagaggaggggaaaagcggtgaatgaacaaaaaacaaatgacttgattcttcaaaccgcgacaaaacttgtatcctttatcattttgcttttctctttctatttatttttatcagggcataacgcgcccggaggaggctttgtcggcggactgatcacgtcctcttccatcgttctcttgctcttggcgtatgatttaaaaaccgtgcgttcccttttgccggtcaatttcatttatgtcgcgggagccggccttctgctcgctgtattaacaggcgttggctcctttgtcttcggagctccttttttaacccacacattcggatactttcagctgccgatccttgggaaaacggagctcgccacagcgacgatatttgatttaggcgtttatcttgttgtcgtaggcataacgatgaccattattcaaacgattggagaggaagaataatggaaatcttaatggctgtattagccggtattatttttatggctgctacgtatttgctgctgtctaaaagcctgcttcgcgtcattatcggaacagcactgttaagccatggcgttcatttaatgcttttgactatgggaggattaaagaaaggcgccgctccgattttgagcgagcatgccaaatcatttgtcgatccgcttccgcaagccctgattttgaccgcaattgtcatttcttttggcgttacatcattcatcctcgttatggcctttcgcgcttatcaggaattgaaatcggacgatatggatcaaatgaggggaaatgatcaacatgaataattttgttattttgccaatcctgatcccgcttttgtcggctattcttctgattttcatgacgaagaatcttatgctcatgagaatcttcagcacggcggcatcggccatcgggattgtgattagcggcatacttgtacagactgtcttcacaaaaggcatccagacactcagcttaggcggctggaaagcgccgtacggcattgtgcttgccgcagaccaattcgccagccttctcgttctcacaacagcgatcatcggtttattggttgggctttattccttccgttctgtcggtgaaaaacgggagcgctccttttactactccggcgttcagttcttgcttgccggcgtcagcggagcgtttttaacaggcgatttatttaatatgtacgtattttttgagcttctgcttattgcttcctatatgctgattgtattaggcggtacaaaaattcagctgcgggaatcccttaaatatattgtgtttaatatcgtatcgtctgccctgtttgtcataggggtcggctttttatacgctgtaaccggtacgttaaacatggcagatcttagcatgaaaatcagcgaaacaggacaaaccgggctgatcactgtgattggtgtcctgatgcttttggtatttggcatgaagggcggaatcttccccctctacttttggcttccaggctcttattacgcgccaccggcagcaatctccgcgttgttcggcgctttgctgacaaaagtcgggttatatgcgattgcgagggttttcacattgatttttattcacgatacagcctttacccatcagctgatgatttggctggcggcgctgactgtgatttttggtatcatcggttcactcgcttattcgaatgtcatgaaaattgtgatctataacattattaccgctgtcggcgtgattttgttcggtgtggcagtacacaccccagcatccattcagggcgcgatctactatctgattcacgatatgctgattaaaggcgctttgtttatgctggcgggtacgctgatcgcattgactggaactgcgagcctgcataaaatgggcgggctgatcaaacgctatcctgttcttggatggatgtttttcatttccgctatttctcttgcaggcattccgccactgagcggatttgtcggcaaatttaaaattgcggagggcggcttcgcagaaggtgaatttacgatatccatgctgattctgctttcgagtctgcttgtactgtactctgtgctgaggatctttatacatgcgttttggggcgaagaaaaagaaacgccaaaaccaaatcatcgaacagctaaaggacttctttatccggcagctatttttctcttgctgtctcttctcttcgggttgggtacagaatgggtgtcgccttacgttgatcaagcggccgagacgctgctgaatccggaaaaatatatcgaagctgttctgaaggagtagatcgcatggcttttcaaattttattaaatgtgtttctcgctttttgctggatgttcttaagcaacagtccaagcgccgcaggattcattacaggctatattctgggaatgctctctctctttttcttccggcgctttttcactcgccagttttatctatggaaattgatttctatcatcaagctctgtttcatttttataaaggaactgtaccttgccaatgtcagtgtgatgaaatcagtcttatctccaaaactgaatatcagaccgggtatttttgcttttaaaactgaactgacgaaggactgggaaatcaccctgctttctctgctcattacattaacgccgggaaccttggtgatggatatttcagatgacagaacaatactttatattcatgcaatggatatcgaggatgcggaaaaagcgatttttgacattcgggagtcatttgaaaaagccatacaggaggtgagccggtgatgtttacgctgatcctgcaaatcgcgctcggcattatggcagtgtctacctttttgtatgtcattcgtgtcattaaagggccgactgtgcctgaccgggtcgtggctctggatgcaatcggcatcaatctgatcgcaatcacggcgcttgtctccattttgctgaaaacaagtgcgtttttagatattattttgctgctggggattttatcgtttatcggaacgatcgcattttccaagttcctggagaaaggagagattatcgaaaatgatcgaaaccgctaaggtcgttgtggctgtattcattttgctgggtgctcttatatgcctcattgcttcatttggcgtacttcgccttcccgatgtgtttacacgcgctcatgctgcttctaaaggctcaacattgggtgtcaatatgattctgctcggtgtcttcttctatttgtggtttgtgacgggggagctctccgctaaaatcctgcttgggattctctttatctttattacgtcgcctatcggcgggcacttgatctgccgtgctgcgtataactccggcgtcaagcttgatgagagaagcgtacaggatgactataacggaatcagaaactttgtgattaaacgaaaagaggattcttatctataaaaataagcagccggacaggcagagttccggctgtttttttatttcttgatgacagccagcgtgcatctggatatacagatcagcctctcttgctcgtcatatatgtgaatgtgatagacaatcgtcgttctgccgatatgaacgggctcggctaccgcctttaccgttccttccttgacagattttaaatggttggcgttaatctccaaaccgacacaagcctgtgttgaatgatcaatcaggttctgtgcacctgcgctcgccgctgtttccgccagggccactgaagcgcccccatgcaaatatccgaacggctgcaccgtccgatgatccaccggcatgaccgcaacgcaacgttccgctgtgttttcaacaatctctataccaagcgcttcaagcaatgtgtgcttcgtatccatcatctacacccccaatatttaaagtacaccgtctgatttcgcaatcaaaaccgcttccgtccgggaaccgacattcagcttattaaaaatcgatgtcaagctgtattcaatggaccgcttgcttaaatgaagggcatctgcgatttcttggtttgtaaatcctttttcaacttcttgaagaatcaggcattctctaggtgtgagcacatcttgttctttttgagaggaaggagccggctttgttttttgctgagtcatcagctgtttaaagtaagcaaaatcgactaaaatttctccattgagtacgtggtatatgtattgggtgatcttttctttagattccgttttgctgatggcaccgtgcagacccgcacgaatcgcttcctcgaaataatcctcgacctcataaccggtatacacgataattttacaatgaggattctcttgtaaaatctgtttagaaagctccatcccattgacctcgccgcctagattcagatccattaaaatgagatcatatgacgagaaatcatgctgcttgataaactgttcgctcggttcaggactgagacaatcaacagacaaattcgaatccgtttccaaaattgtcttggtgccttccatgacagccggatggtcatcaatcactagtatctttttcatgttttcctcccttttactcactcttttccattttataaaaaagacttggcctgtgccaagtcgtttccgttataaatccattacaattcgatttcaatatcagccttaaagccctttccttcacttgtttcaatccgaaggcgcccatctaaagccctgactctctccttaatgccagaaagccccatgctcatggaatgctcagtatttttttcttgatcaaaccctacgccatcatcctcataatgaagaacgattttgttttgaatactgatgagcataatcagcacatccgtcgcctgagagtgcttgaccgcattagacagaaactcttgaatgatccggtacaaattcagctgcgaatccagatcaagggaagccgtaaatctcccggtatttaaacggatatgaaacggaacccgctcctgctgctgcgccaccagcttcgacagcgccttcaccaatccaagatcatacagaagctgcggccgcagctcatgacacgtctccctcgtcatcgaaatcacatcagacatctgctcattcatctgcacaagcttgtcctgcacctcttcacggcacggattatcatccttcttaaaatcacccaaaaacagctcacactggcgttttaaggaaattaaatcctgaagaaccgaatcgtggagatcgcgggcgagatccgagcgttgtttttcctcgatcgtgtacatgagttttttgagccatacggggttggattcttgttgttttatttcttctaaatgactcatcagttcttcgattttcatgacgttttcgatcgatacgtttgtataaaaagccaaagttttcagccaagaaagttcttcgagtgtgagacgaggcgtattcattttagataaacaaaggatcacaaatgatttaccaccgcgttcacctattttcatgacaaagcctttattaaattcaacgattttccctatttcggatgttacttttctaaattctttttgatagactttttcaaatgaatttacgttctcatcatcatatagtttaatatttccgtcagctgaaacttcatatacatgtgctcggctaacaagagaaacctcaagtatagtatttttcagttcttcaaatacttgagatagggaagtagagtctcttatcatctgcgtgaatttatatatactgtcttgataattgaatttttctgagaccctttttaatctaaatctgaaatcaagtacttctttataataaaagaccgccaacatgataatataaattaaaaaggttagtttaacactataaaaatcactatcaggactactaattaattcaattgtagagattagaataattgttggcgttagagctaaaaagccatagtaccttaatctgcttaaaataaaatctacattatagattttatttgtcatgaattgaaataccaatgagaatggtatcagcagcataaatgaagccgctaaaaaagaagaaacataatgtgcatttaaaaacacgtaaggtatcaaatataaacacagaaaaggcgaaaaagaaaagatattaatgatagtgagaaccttaataatatgtgcttgttcagtgtctttatttttaattagtatgatactaaaataaacccctactataataaataaaaagaaaaaagcaagtaaatttaatttaggaacataatctcgaaagaaaagatgtgaacgaaaaatttcacaaactacatttatgaccggaatcaaatataaaataaaaactttcttattaaataatttggttcctaattctttgaaatattgataaagaaagagaagatagtttagcggaacagatattaatgttaccaccattataagcctgctcagcatatctcccttagcagaccctccagcacttataaatgcaatagaggcagacaacagaaagataattaaaactacagctgagagaaggttctttgattcatttatttttaatataaaaaagcaacaaaataaacaaacaatataaaatattaacggtattaagtaagtagtgaaatttttatcattaaataaggtcattttcaactcaagattatgtccatttctttccacaatcatcgaacttacattttttagtttgttcatttttatttcgtttgtgtttatctttttattattaatactctttacgatatctcctttttctataccgctgtatgaagccattgaaaattcatctacattggtaattacaatatcgccattttttcctttagagacagttgcccctactaataaattattattactaatataagtcaaataaataacataaatcaaacttaatacaactaacactacagaaattttgttatttctagacttcatttaaacctcagtacttccaatctagcattgaataaatttctaatcctttaaaaccatttattatgcattcagattgatcattatcaacacccaataaacaagcatttccttccattacttcccttaaaacatttgggtatttaattaagtatcctaccatttcttgcataataaatcccctccttatttaatcataacagacaataatttttcagttttatcttctcctagttttaattgtgacatttcattttttattttttggagagataaatgtttcatcaccagtaaatattgtataacgcctgcttctgtcaattttcgcttcaaagccttagtattaattgaaacaaattcctctggtttttgatataaacttagtagctccgctgaagcatcgttaaattgtttctttaagtataagtatgccaatgtattttttttctgaacaaaatcgttatttaagtaaaacaaacctttataatcattatcgatctgtgaaataatcccaagttcataagaataagaagccacgatgggatgatatttgcctgttgccaacattactcccattacacaaggcaatgccgttagcgctcctgatttatttttgatcatttcaagacaggcttcttcagtttgcggcgcattcacaatatcatcatgctggccttgaattgattgtaacgcaaaattcaatatctcttgtgaaaattctggttcatgactagcttgacacatcacttgtatacttagggtgtaaagagctgtaactgcatttaaagcgattgacgagtcaatcttcatccagacagcacttccattatcttgatcctctaagtcatcataaatatcgaatgagagtataagcaattcaattccggcagctagccattcgattgctttttggtcctgaccgttaaaagctaaataatgatgaagagccaaatcggcaaactcaaacgtatccttagactcaataaaattctgaagatatcgttccaagtcctgattcattattttttggcttacaatctccttcattttctccttgatccggacagaatctaaacatatctgctcaataacgacttcccccctcccattccattttactaaatgggacatttaaaggacagcaggtttttcgttttttaacaatcatataatactttatccatttattgtatcggtagaacgaaaaaaaagacttgtttccaagtctttttcacgaaattttcattgcataattgtatttatcgagttgatcaatgcttttgttaatgtttcgtaatgaatctgtcgtttctttaatatcaagttcgagtcggaataacaattgttttacttcttcaagtttcttttccatcgtttccacactcctttttttgaaagatcaatgaattgtgtatggtgaacgagtcctaggtatttgatctgttactaatagtgtatctgctttcggctcatttttcaccgaaaagtatgcaaaaaagtcctgcgtgacaccgcaaatctcaataggtccttatactcaaaggaatcacaacaagaacgggactatctttctatgcgaaagagcgtttatatgtgctgaaattgagaaagattcttaatctccttgattttaacgggtttcgcattttcattaagcaagactatagtccttcataccgtattttcaaaattgaatatgcgattcttggcgtttcctgaccgacaaacaccgaaaaagaccgcaacgctaaagttgtggccttttcgctttgtcatattcggcaattagggatctatacatatagaaacatccttttttgcgaggtgctcccatgagatatcgttatccctggttttacgtgtatccgtatgaggtacgccgtccgcccgctcctgccaacaatattgatacctttatccgttcagcgaggcaggccgcagggatatttgcggatgcccagctcgttctcggccgcattgcgggctcgcgggagctctcgcgccgcattctgacggcagccgagcagtccgataaacaaaccatcaagcgcctgatcaaacaattgggcgtccggcatgaagtggatacggtctttaatcccgacggcatctatatcagtcttatcggaacgcaaagccgaatgattcttgctttgcggtggtcagaggaccgcaatcattttgcgtccataagattatgacaccattccagagcctcaagataacattcatacgcttcttctttgtcgagttgattgcctaattccgagcaagtgtcccagttgttgctttcaattaatttcacaagctcaagcatttggtagtagtcgttttgatggcctaataatgcttgcccgacttcatcttttaaaggcaattcttgaacaatttcctctatttctctatgcaggagggtgtctatgagagaaaacattccgatcagcatataagaagcaggctgcggccgggatgtctttctcgccagcagttcgcaaagctttgctcttatcaaagaaatcttaatgatttcgtgcttgctggaatgccctttcctgcttaaatccttaaaggaaagaatatagatccaccgtttgatttcattaaatcccagcagcataatggcctgttgaatgctttcaattttctggctcaaacggctgtgggatgagtttaaaaattttaaaatttgataggacagtgataaatcccgctctatgtactctgtcacacgctttatgttaggctgctctttactcagttcgttaagcagttcatagtaagaatagaaatgagtcgataggtcatgcccgctgatgatgcgcggctcgctgaaaaagtagccttggaataattgaaagccgtcttggaccgcctgtttatattcttttcgggtctctactttttccgctaaaaaaatcaggccgcggcagccgtaggtttgcaaaattgttctgcgttccattcgtgttgttttgagaaaatcaattttcaatatatcaatatagctcatgagtttttccagtaagtcctcatcttgcgggtttattgcataaaaatcatcaagcgccagcatataccccatttttttcaattctttgcatctagaaatgagggccggcgtgatcggtatatcttcaaggatttcaatgacaagctgtttcggattgaaggaggtaggaagattcgaaaacatcaggctttccgtaaaattaacaaaacagcgtttcccttccgtcagcttctcaattccgatgtttaaaaagctgttgatcaccaaatctgttgttgcctgatcgccgtctttagcgctatacacgttctcttcgctttctctatacagcagttcataagcaacaacctgttcttttctattaaaaataggctgtcttgcaacaaacaccctcattgatttatcccccttacaatacgcgcggctttcacccctaagtatatcaaataatttgacgaaaattgtctaaacatgaaaaataatatatacataaagaaaactggcccttcgtgaacgaaaggccagtttttctttattcttcctcaagctcttcttcaattctgcttttcacttcgtggatccgctgcattttattgctccagcagtcctcgcttaaatcaaccgggtattcctccggcttgctgattctcttatattcctcccaaagcaggctgaggttatcctgcacatactgctgtatgtctgaaatctcagggttttggtagcaaagaatacccttctcaaaaatcagctcatgaagatccttcgcataaaaattcgtgacaaatttgctgatgaatgtatgaaccgggtggaacattctgagccgcttctgatcattcacctgctcatcataaagcgcaatatagtcgccttcagaatgatggttggactgattaataatgcggtagactttctttctgcccggtgtcgtcactttttcaggattggacgaaattttgatcgtgtcaaccattttcccgtcttcttcaatggcaacgagtttataaactgcgccgagagccggctggtcataggcagtgatcagcttcgtaccgacaccccagacatcaatgcgcgctccctgagcctttaaattcataatggtgtgctcatccaaatcgcttgaagcaatcaccttcgcatctgtaaatcctgcttcatcaagcattttccgggctttttttgacaggtacgccaaatcgccgctgtccagacggatgccaatgaaattaatgcggtcgccgaattccttggcaaccctaatcgcgttcggcatgcctgaacgaagcgtgtcatacgtgtcaactaagaaaacgcaatccttatgtgtttccgcgtattttttgaaagctgtatattcatcgcggtaagcctgcacaagcgcatgcgcatgtgtgccggaaaccgggatattaaagcgctttccggctcttacattgcttgtcgcgctaaagccgccgattaaggctgctctcgctccccacatggccgcatccatttcgtgcgcccgtcttgttccgaattcaagtgcaacttcatcaccaatgacgcctttaatccgggcagcctttgttgcgattaatgtttgatagttcacaatgttgagcaaagctgtttcaatcagctgcgcttctaccaggggtgcctccaccctcataatcggctcattgttaaaaacgagctctccttctttcatggagtaaagtgaacctgtaaaagataagccgcgcaaatattcaataaaatcttcatgatacccgagttcatcctgtaaataactcaaatcgctatccgtaaacttgaaattttccaagtattcaatggctttttccaagcccgcaaatacggcatagccattttcaaacggaagccttctgaaaaacagctcaaaaatcgctttcttttcatgaatgccgtctctccagtacgtttccgccatattgatctgataaaggtctgtatgtaatgacaggctgtcatctttaaatccgtactctaacactgtttttccccttccttactctgccacttgcgctccgatgctgtttgcaaaatgggaaagagcccatgcgtgcccctcctgattaaagctggcaacagcttgtttatgcacaacaatcccaaaacctttgttgtatgcgtcaacagctgtatgcaacacacaaatatctgtgcagacaccggcaaggtgcagttcgccaatctgccgctctctgagtttgagctctaaatcagttcccgcaaaagcagaatatctcgttttttccatgtagtaaacattaggctcatgttcatgtttctgatatagaggcaaaagctttccgtacagatcttttccttccgtgccttttatattatgcggaggaaaaagacgggtttcagggtgatattgatccccttcatcatgagaatctactgctaatacgacgtaatcaccgtttgtgatgaattcttcagttaaattgacgatcgcctcttcaatcattctgccgggctccccgcaggtcaattttccgtcactcgccacaaaatcattcgtataatcaatacaaataagtgcttttttcatagccggcctccccgccatcagtatgagaacattatatcttatctccagttgtaagtgaattgccatgaacaaaaagacaaacggtccgtttgtctcttaagatttcagcactgaccgattataaatgtcgtcctgaatatatatcaattcacgattcacagcgatgtcagccgcaatgacgatgcctaaaggcgtatgaaactgaagatcagatacaatcttgaagggcactccgtaccggttcgccatttggatataaggagagtaagactgatactgaagctctccattaatcaaaagggtgacgttatggctgtttttcagctcgtgctccgcctctttatacggtttgcttctaagcacctgtccttttgtcagtgccaaaacgactctttctcttagagaacctaaaaacaagtggcgctcgtcaggctttgtctccaaaggcccatacattccttgctgcaaatagagatccattttatcttcactcaaaagcctgtcctcccgtcttgtttgtcttcattatcacctgatcaggcaggagctaaactttcaagcgccgtttacatttctgttacccaatgaatgatttttttggccagctcaccagcagggatttcctctgtatgccggcgcaacgacgcttccagccgttcaggcagagttgctttatcttcttcataggaaatgatcgtgctccactccagctgcggtaccgctacaagcgtgcgcagttcttttctgttttcatgcagatacacgtccgtgatcattccggtttgcgtattgatatttgcttttctgattttcataacatgacctctctattcaaagactacccatattatacaataaaaaagcaacagcctcttgtgaaaaggctgttacccgttaaacgaaactgtttcatcagtgatatcggcatctttgaagagagttttactcgtttggttgttaatcttcacaaaatcaccaagctgaaatgtgcctgaccccgcccctgaatgagcgacgcttttgggcgaaatcgcaaatacgtctccaaagcttgccgcggcattatccgtaactgacatgatataaatcggccccacaattgcaggcatttccccacctccgcattgatttacagcatcatatgcaaagagccgataatggtgccctcctattcagctggctttgctttttcttcgagtcgtgaccgctggcgcagcttgatcaaacggacaatattcaggaagaacgccttcactaccgcataaaccggcaccgctaaaatcatgccgagaattccgccgaagcttcccgctccgattaatagcaaaataatcgtaagcggatgggtattcagccgctttccgatcacaagaggagacagcaggtttccgtccagctgctgaacgatgacgaccacaataatcgcaaacagcgctttggccggcgagtccataaaaccgacaatgacagccggcgcggcaccgagaaaaggcccgacatagggaatgatattggtaatcgccatgacaatcccaagaatcagggcatacggcagtccggcaattaaatagccgataaaacacgctgttccgacaaaaagacagattaacagctgcccctggaaatatgccgcaagcgtatcggataaatctttaaaaatctttaagccttctgtccgataagaagccggtagaatttttactgccaaatgcggaaagcggtgtccgtctttcagcatgtaaaaaaggataaatggaacagtaataataacaagcgtgatgtttgtcacgacaccaaacaccgcagataaactggacgtgatattttgcggcaggttttggagaaaacttgtcaatgactgttcaatttttgatatcgatacataatcctggttcatcatccaggtaaaccattgagaatgggacaaatcctttgtcagcgcctgaatctgttttatataatcaggaaggttgttaaacagccctgtcacctgtgaggtgatgataggtccgactgacgctgaaataaaggcaagcaaaccgataaacagtaaatagatcaataggatggataatgtccgcggaatttttttctcaagcaggcggacgaccggattaaatatgaaatacaaaattcccgcaattagcatcgggaaaaacaatgtcgagataaaaacaataaacggctgaaatacaaatgaaacttttgttgctacataaataatcagcaaaacaaataaaatctgcaatgtccaaaaatggacttttgatttcaacaagctttgttcctcctagtttttctttgtctgtcagataaaagaacttataccccatcattgtaacaaaaatgaacccatatcagaactcttaatataatgaaaggagtgttggtgatgaaggccgtgacatacgatacagattcagaactggcttatatctatgttcttcctccgaaaaggaacaggaatatacggtctgaggagcttaaagtcaatgattgtatcctgctggatatcgaccaagacggcaaaattgccggattcgaatgttttggtgaggcagcacacctctgtgccccatttgccgggaaatcccggctatatgtaaaagattcagacggttatcattttcgggtctgccagcatgcttcagtccgttcctgctatacagtgtacggcgtcactttctgtttttcagatggtgactatcaggaatttgccggttttgaccttgacggaacaatgtatcatagtgcgtttttacagcgcttaactgaaaaataggacgtcccggtgtacgcctatttttcatgcgcaagcactgttagacccgctcactgtaatctggggtgacggaaatcatgtgctggattctgatcaaacaaacagaatttcgggctccttcaattgtgatatggtcaggtttaacatcgatcagtctgcctctgaccgtatctcgtactgtctgtataacgaaccttgagccgatgagctttttaatggtctgatagacataaggatcgactaaagagaccagttgcggactaccttggttgaccatatttttatcccctttgtgtgttttatctcagcttatgccgcgcttatggataatgacacaggcttacctgataaaacaaaggggtgcggagattttaggagaatacgtttggaagcggtgtaaaggaagtatcgatgaagcggagacagcgaagaaagctggcgctgttccgtacttatacaggctttatcacggatgcctgggcttggtcgattaattggtccagcttttctattttttttcgtgcggttgaaggatcaatttggcggtaatgatgatggccgcccggctcttcatccagttcgtccgcttttttgacaatctgctgcagtgtgtttttatctaattcgccttcaggcaaataggaatctgtatgaagcaaaatggctagtgcaatctcttttgctgctttcggttcctcgccaagccgaatcagaagtttatgcgcccgttccgcccctttaatggcatgaatgtcatttcttttgtatttctcataatcccactttccgtctgtataccattcataatggccaatgtcatgaagcagtgccgcttttgctgctaaatcaggattaatgtcagccttcacagacagcctgtatgcatgataagcgcaggcaatcgcatgtgccacgccggaacgctgaagatatttttgtgcaattggatgggtgaaaacatccattaatgtaacctttctcatggaaacccctcctttagatatttttagaatcctaacataatttgcagagaaactcaattcttatgtcacatcattttgatcttcttatcatcattgttataccctaaaagcaacgtttcagtcagtatatgcggctgttcaataaaatgcgctggctgtagccttttgtataaaaaaaagagcagaaaatatctgctctacaaaaactctttaatatcataaatgcggccgttttccgtccctttttctagtaaagaaagcagcgtgccggcaataaagtccggactgcgaaggcttcctgtttcatttaatttccggaatcgttcaatgtggtggaaatcctttttcgatgaagaacggatgacggcctgcatctcagtgtccatcactccaggtgagaacgaaatcatgttcactggcagctcttcatcctcctgttcaaatccgaatgtcctcgtaaacatgtcgagcccggcttttgaactgcaatacgcgctccatcccttatatggatttttggcggctcctgaagtaatgttgacaatcgtctttttgccgctgtatgaagcaaaccgttttgtaaacagctgactcaaaagcacgggcgcagtcaggttcagctgataatggcgctgaagctcgtcaagagacgcttcgccggcacgtttgatcggcgttaccattccggcgttattaataagggtaataccagaataacgatctgaatcgatggatgagagcaatgtttcaaattgctgttcagcttcttcgagattgatgaggtctatttgatgctgcgttagtttttcatgagagacatccgttttcgttctggataaggcatggacttcatgccccttttctaaagcctgtaatgcaatggcttgacccagcccttttgacgctccggtgatgatataaagttccattggaaacctccttttccgttattattgtacggcaccgcttttacacaacacaagcacgcggcctacgctttcttgttttcctgcgctgtgacttttgggatgaggaacacgatgcctgcaattccgagcaggatcagtacgacatagatcatcggcagcagcaatgatgatgtttcttgttcatcttctgtttccgttgatgatgtctttgttattggtttatctgcaaatgtaattccaagctgtttcgactgggccgcaatcgtgttggaatcctcggcatttgttgatgtaaacaaatcttttatcagctcggcgtccttgtccttcggtttatcaaaagtgatatccttttgttcctcaggcagttctgttttttcttcatagtaggtatcttcatgcaaataattcgtatcgatttcgatgtcttttttctcatactggtttggcgcgacatctgtattttcttcagtttgggcagcagctgcagagggtatgaaaagggaaaaagagagcatacaaatcatgatccccttttccatgctgcgattacgcttcatacgtttcatcgctttctgctgtgtgttcagccatcagccggataatcagcggcagagccgcggcaatcaccgtaatgatcagcagaactgttattcccattgtaaacaagtgcccagtaccgtactggatgtcgatatatactttcgaaaccggatcttcaaatgtaaagttcggcatgatcaaatcaataagcggtgcgacatagaataggatcattgctgctgaagcaacccagccagggattgatccgaatctgaatgccgtccggatgaaggcagagcttgcgaccagcaatagaatcgtaaacaccgaccacttaatcgtctgatcgtccggcagtgaataaatattcaagccgaacaagctgatcataagtccgacaaggatattcagaattccgaataacgctcctttgacgagaagcggtgcgttttggtaatacgagctgaaatagccgattaacagactgctgatcaacacaatgacaaggatgacaaccggaggtaccgtctgaattttttcttccggaacctctccgctgattttaagcggattcgctaagtaatcatatacatagccattgttttgcccgtctactaatgtatttccgagtatgccgtatacgtcatttcgcacgagtttcgtggaggcgacatttttcccccagttgttgtttaaggtgtcggctttcgcttgaacatcattgacgctttgctgcatgttggttgtgtaatcaatgatgccggactggcgatcagacaatgaacccatcatgtctgacatttgcagcacttcctggccgaccgtatcttggacactcagtgccatggtgccagacagcccatcgttgctgaacgtcgcagattcctgtgttgcgcccgttacaagctgttctgacgcttttgcggcactttcagagattttcgtcagttcgtcgagaacacctgcttgagagtcacggatatagccgctgtagtcgtccgcaaatttggtcatgccgtcgatgaagctgttaatatcctcatctgtttgcatcgtgttgtttttgagagcttcccagctggctgattcttcaggtgtgagagccaggactgatttgacgttgccctgctggccgtcaatagcgccggcttttgcagcactgtcaatcgtaccggataatacagagtcataaacagacaaatatttatagtatctcattaaagcggagatgctttctgtattgatttctcctgaaaattgaagctgatctttattttcaagctcgcgaatcgcactgtaaatcccttcaaactcccgcttccgtttcgcttcgagattttcaagtttaccttcgagctttttcactttgtctttcaggtcatcaatttcatcagtgagaccattcatttgctctgttagttcctctaacttctttttcaactcttcattatgagcagtttctttttccttcagttcttcttcaatttgcttgattcgctcagacgctttgctgagctgttcttttgctttggcgatatcagaaatgtcatcgtttcctggttgctcttggtccccaggctccgtcgtatcttcgccgctaccggtatctcctgaatctccggttccgccttcatttgccagcttgataaattgaagggctgaatcagaagatgcagtctgttcggcagatgtgcccgtttcagtttttccgctgtcggacgcaccatcagaggcatcgccgttctgctcctgaccgtctgttcccttctgctggtcttgatcctgagtactgccgtccgtttgtccgtcattaccggtatcactgctgttattgtcgttccctgtgtcgccctgtgtatcatcgggctttgtactgcccccgtcatcaggtttttctggattatcagtggacggatcgtctggttcagtacccgggtcctccggtgttgggtcctctttttcaggctccttcagattgtctgaaatatcctgaatatcagcagcgatatttttcagttcttcacgctgtttttcaagatcaattttgagttcttcaggatcttcttctttagggtctttatctttatcattgttgtcagaaccatcgtctatgactgggtcgtcccctttcgcaactgtcaatgcctgacgtgccgggacaagcaattcatacacctgatttagtgcagcctgtcttgatgcggcctgatattgttcgattaaattactttggatttttgccatgccaagttcctgctgtgacacttgcccttccctaatttgctgggcgtttgccagcacattactggtttgtccgagctgtgacttcgcttggccgatcccagttgccaatccgctcatgcgttcgctgaactgattcgccttttgctgtgcctggatggcatccagacctgtccggatttgctgctgtgttgaatcctgggctgccaaaagcagctttttctgattttcttgatattccttgtatctttcaactgtatcaatgaattctttcagcgtatttttggcttcctccgctgtagaagctttttcttttgtcgtgccttgcgcttcattcattgatttcttcagctcatcgattaaatctttttgctgtttgatttcacctgctaaatcattagagcttggtttgtaaaagttgtacatgacattctggaattcagattctttattgacgattttgtcaaattctcctctgatgttgtccactttttgcgacacaaagttccagtataaggctgacatttttttgttcattgtcttttgggcatcctcaagctcacgctgaactttttctttgttgaccgcattcaggttatcttgaatgctgaattcaagcgttgctttttgtggatggtctttgtcatagctcaaaatgttttttgagaagtctgagggaatgtagacgatcgcatcgtatttttttgacgcgagaccggtctcagccgcgctacggtttacgaccgtccacgaataatcaggacgttcacccagaacagccgctacttccttgccgaactgggcggatttgtcctcttcatcagactttacctcatcactcaatacgccagtgtcttcattcaccaccgcgatttgccgggtggaattgactgcttttttcgtcgggtcgtctccgataaatcggaaaaacaacaccggcagcagcaaaatgatgatgacggcggatattaacttgatcaagctttttcgttgttctgtcatctagcactctccctttcagcagaacataaaggaatttgaactttttgctccttcccgttttccacaacatatccgaagcccggctgaatctcaggctcctgtctttggtacgggagaggaatgacattttgctcagactttttcatcagcagaatcgcgtggcggatttgcttcatctcagtcgtcaaggagtcatagccttttgagaattcgctgtggtttccgcccgggataaagctgaacccaagatgagcgtatgatttcatgaagttagcgagacgatcttgtattctcgtatcaatcgtctgctggaatctcgttatcccgtcaatcatcagcaccacttgtgagaatcgaagattttgcgcgtctccttggcggacggcttctacatacatggcttctcttgttttgaaaatgtcttctgctgtttcaatccactgctcaatatcttctttcgtttccaaatatgaaacatctgattccttcgcataatgagataagccgcggtcaatcgagtcaaacaggccgatcatttcggtttcatcatcaatcagatgttcgagcatgacttttaggacgtttgttttcccgcgctgagtctggcctaaaatcaggcagtgcttatgcttgcccaaatcaaaatagactgggctgactgtttcttcatgaagcccgatcggtacagataaaggcttgcgttccagcttgaagcggagagaaaattctctcgttgtcaggctctcaggcagcatcggaatcggtgccggctgctccaatgaagcaaatcgtccttgaagtttctgtacgtctgatttcagctcgttgaacatgccgatatcatcatcggcgtcaacaggcaggaacatttgcgcgaaataaagctcttccttttgaatgatgacgcgtcccggaatcggctcaagattgaatttcggacggccgtaaatggaatatccttctgattgatccatgagataatggacaacctttgttttcaagttatttaacaatgactggcggacagcattcacccgcgttgctgtcagcataaagtagatacccaagctttgtccgtctctggaaagctggacaaattccgattcaagctcatgcatctcatccttgactatgtcaaagttgtcaatggtgataaaaatgaatggaagctcttcttcgctcagcgcattgtacattttgatgtggctgatttctttttcccggaacaaacgtttacggcggtcaatttcttctttgatgcgaatcatgaacttttcaattttccttgactggtccatcaggaagtaatccgcggtatgcgggagcttcgctaatggcagcagcgttccgtttccgaaatcaaagatatagacatgaagctcttcaggtgtgtatacgtccgcaaaactcatcaggaacgttgcggctgcaatcgattttccgtagcccgaagagccgaagatgccgatatttccatcttccatcatcttataagcaattggcgcctgtctttgcagatcaggttcatctacatacgcaaagtggaaatggtctttttcgtttgaagggaaaagagtgcgcggaatacgttccgcaagcggcggcagccaagggcttggcagcttctcaattcccatttcatcttggatgcgttcaatttcgtcaactacagcttcgatttcggtttgaacgtcttttttcgcgatatcttcggtatcaacctcagaaagcgggatcagacccgtatctgtaacgatcgcgatttcatcctcggtaccgtagacttcctctaagtaaggcgccccgctccatgcagattggaaaagctcatacacttcattgtttccgacctgcaaatagccgcggcctgttacggtaatgtttgcggcatcgctgtttttcaaaatttctttactgtcggtggcatcctggaccttgagcgctactttaaagcgcgagttactccagatctggtcgtcgatgatgccgcctggcttctgtgtcgccaaaatcaaatgaactccgaggcttcgtccgatacgcgcggcactgacaagctccctgataaaatcaggctcctcgcttttcagctcggcaaactcatcagaaattaagaacaagtgaggcatcgccacttctgctttcccttgcttgtatagctttgtatagtcattgatgtgattgacttgatactggtcaaacaggcgctgcctttttttcagctcgcttttaatggaagcaagcgcacgcatactgaagtttttgcttccttcaatatttgtgatcgtgccgaggaggtggggaatgttgcggaacggctgcgccattcctccgcctttatagtcaattagtaagaaagccgcttcatgcggatgaaaatgcactgcaagtgacaagatgtaggtctggagaaattcacttttccctgatcccgttgtccccgcaagcaagccgtgcggaccgtgtgctttttcgtgaaggttcagatacacaatgtcatctttccctttatagccgatcggcactgacagcgacttcgacgattcacttgtcagccatctttgctgaatgccgatttcttttacttccttcgcatgaaaaagctccaggaacgataccgtttccggaatggaattcgtaatgccgacctggtggttcagcgtccgcagcgtgcgtgagaaccgttcgttgtcctcacgctgatgatgatcgagacggaacggaattcttaccgcttttttcttttgtattaaaatgtcgccttcatgctcattaatgtagcggacaagagttgtaatgttttccgacaagctttcctttgtttccgccgcgacaattgtcgagatgcccagatgctcatgctgtccttctaaatattcgagaatgacatgctcagagatcagctgctgattcgtgatgacaaatacaaaatgcggtttgaactgcagtttttctttgtcatcttcgagatcacgctctctgatcaattcgtaaagtgaagacaagagctgatctcgggtttgctcattataaataaatccttttgcataaatatggggcatttgaaattgcggaagccacttcatccactcccagtctttatactcttcttcatgaaaaataaatacaaaacgcaaatcgtgatagctgttaaagaacgacagctgtccgattagctggtgaatctcatttttcacaatttgcgatttaccgacaagccccatcggaccttctgccaaatcgaccgtcaccggcgcattgcggatatctttatagacgcgctgcatgtgctgcgatttctccatgaggtcatcgatatcacgattcgccaagtctccgccgctcatattgatttcatagcttgacggaactgttcccgtcccaagccgcagctggagataatccttgctttcaagtgatttttcccagatccggtcactgatttcacttgttaagtatttcatttgttcaaatgaaggaaagtgaaattcaagaacctgcttttgcttttcagcaagtgcctgaagctctttccgcttattgtctaagtaaagcttatatacacgctcccgtttttcctcgcgttttttccgctggtttttatcccggaaatattgcactgtcgaggtaatgagagtcatcataaacatcgccaaagaaacgagtataaatatgccgcgcggctggatgatggcaactacgcccatcacgatcagcatcacaagcggaggcaggatgacgagccacagccctctgttggtttgatcgctctcctgagagggaaaactgaaagaaacgcggtcatccggcagatcgtataccatccgcggcgttcttctgtactgcggatattttttctgcatttctgtactcggtttgaccgtttctgttaacgctgtttcaaactgggcataatgaacaatttctaaaaggtcttgttccgtcaccctcatttgcgtgaagttccagaatatctcatcccccggcttgagcggcgtattggcgttgattttctctccgttcaagaagatcgttccgctttcaggtcggaccgaccagctgccgcctgcacgaagcaaagaaaacgtgctttgttctgcaaatgcaaagtcttgcggattcagataaatatctgcattcgttttttctgaggaacatacaatttcatcccggtttcccgtaaaataaacggatttctcaggttcactgcccgtcaatatcaagcgtatatcctgctgatccgtttggagagtaaatgatatatccgcctcaatcgtgccgagacaatcatttcccaggaaaacttcgtattggccgccggattcctttcttttaagagaaatcactccgctattaaatggaatggagctgatcgtaacagaatccttcacatcaggccctatggtcaccggatgagacgacgggaggttagacagatttaatttttgaacgttattttggtaaaaaacccataatagactcaaatggcgaacccccttacggccgaatggcagcatgcgatgacctgcgcttcatgtctcacgttatttgtcatcttttttctcatctttcttttctgtttcttttttctcgtcttcttttttcttctgttcttcttttttcgctttttcctcggctgcggctttttcttctgccgctttctcttctgcttgtttttcttcgtctgtttgtgtctgttcttcgcttgtatcgactaacgatgtttcagaattagactgtttattttcttgacgttctttttgcgctttttcaagctcactatttactgagtcaagttctttttgtatgtcttcatcatttgtatcctcagataaaagctgctgtttatatttagctagggcaaagtaaatataatcattgtattcaagcttacggccgatactgatcgcttctttgtattctcctcgaccataatcaatccaatataagaaatgctgagggtctgattgaagggtgactaaattattttctatatttttggtttttgcactccccaggttttcgacctcaacataggacgtcgccagctgatactgcaccgattcaggcaggctttccgcatcgtacttggacagtgtgctgatgacttcactgtactgcttgtttaagaacgcacggttgctgtccactatcgcttggtgctttggctgcgcgaaaaataaggcgtacatcgaataaataagtgccggtacaagcaaaacaatgagccccaagccgatatatcgctggatgttccacttctttctcgggatatgtatgtatgtttttgctttggcttcgagctcatcaatatgggtttgaatcagctcgagcaaatcatcataggattcagcatctaatatcgcctttgcctctgcggagaacgtcagcgtttcattgaatttcaggtagtcttcaaacgcaaaagcgccgtcaactgccaaagccgctgccgctttcagctcctgccatactctttcctcatcacgctcgtaaggaggaatgctttcttttactccataatggagaaaataaggcgtaagccctttatcgaatacaatgttttcaggagcgacaatcaaattcagcctcgacagattgtgctgctgtacggcttgaacaagctgataggcaaactgccatttactttttttatccttagctttcatgaagcggaatgctttataggaggagggaggttggattgtgatgattacttcatcatccgtcacatcgatttctttatgaaaaaatggatttatatctttgatcacgttagcttcaagaccgtcgagaagctttattttttcccgttgaaaggtaaatgtatagccggcatctgttttctcggcaacagcttctaattggttttctaaatatgatttttgttcacctgacattcaaccagatcctttcataatatttcaagccggtctccgtttgtaatgccgcaatcagacagcttgcattctccggaaaacaccttatccttgttcaccactctgatccagtgcccttcgcgcggaggcatagatacgctttgggcctgccaagcaatatcaattacttttttcaccgggtggtaatctgacaatctgagatcaaagacactgccgttataatgtttcaaatctattgtaatatcaatatacatttaggatcacccttacatagaaagagcgccgtcttcttttgaatcaggcgctccttccctttcatactgttatccgcggatttgatttgcgatgtcttggtcagtagactcaagtgtatttgctgtttgatcaagctgctgattcacatcttgaagcaaatctgacattttgataaatgaaggtttgagctgctcgtattgatctgcgaacgcttcgcttgaagcaccttcccacatgcttttcaaatcagagatcattcggtttaaacgatcaacctgatttaatacttcttggctttcaacgccgtattgcttcgccatcgctcttagctcttcgggtgtgacacgaattaatcctgccatattcctcattacctcctgtgccatcagcctaaatatgggctaattcacttatttttagaacgtcattattataaaaacagtttttcggcatagtcaaacaaatatgttttaattttacaaaatgagtccaatggtttaccccgaatcacttaaaaatgacatatactgtaaagtaaataggtttattttcttaatcttctcttcattctccgaataatccaaaagacccaaataactccccaactcccaaaaaaaacctttcagaaaatttgatgctacagcaccatttctgaaaggttcaattttttctttccttaattagtctcgcctccgatgactttcttagaagattaataggataagctgtcgtattatatgaggcatacaactgtcctgcaaaaaggcgattacaccgccaaatgtatatagaacgtttctctcatgaaattgtttttttgcttctgttctttgttgttgattttcacaaacaacaacaatcataataaaaggaaggggatgagatgtcaaagagaaatcaagcacgaaaagtagggagatttatgaccatgccgaatgatccgtttaaatatagttttgacagacttgaagatgtggctgatcatatcagcgacgttctgcggtgcccgatcaccatagaggatgttaaccacaagctgcttgcctacagtacacacagcgactgcacagaccctgcccggacgtctaccattattggcagaagggtaccggagaaggtgattaacaagctgtggaaagacgggacaattcctgctctcttaaaaacggaccagccgatcagagtcaagcaaatcgatgaagtcgggctgagcaatcgcgtcgctatttcgatttggaaaaacaagcaagtacttggcttcatatgggcgcttgagatccaaaaaacattgtccgatgaagatctgctgacattgcaaatggcagcaaaagcagtgaaaaacaagcttctcaaacttcaaatcagaaaaacgaaaaatgaagaacgcagccaagaatttttctggaaaatgctgaccggacacatccatcaggaggatgatatggcggatgggttccataagcttggaatggccgctccttcagagttttccgttatgatcatccgcataaatggcgagctgactgaaaaaatcgaacagcagctgcaatatttacaggaaacgacccagcaggtttacgtgctgctggcgaccgtagattccaatgaacttattatattaacctcacccaaaacagatcatccttttcaagatttaaaacagtttgctttaagtacgcaaaaacagctgaaggagcggtataaaatagaagacgtttctatcgcttttggcggaatatacaactctatttcttttgtctcccgctcctatcaggaagcattgtccgtcttaaaaacgaaggaacggttcgctgaagagaccaaacattttttcagcttttctgagttaggcatttatcaatacttagatgtcttaaatgaaaaacggaaacaggcgggccattataattactcgctttccaaactggaacaatatgaccgggatcaccagtcaaatatggtagagacgctagagcgctttattgaagcagacagcaacgtgaataccgcttctaagctgttaaatatacacgttaatacgttgaattaccgactcaagcggatcagccagatcgctgaaattgatttgaaaaatgtgaatcaaaaattcaccatctatttagatatcaaacttcggcacatggatttgtgaaatttcacaaatccatgtttttttattttcttaatcaaacaaagaattttccaaaatatcaagctacactaaaaatatcacagatacaggaggagacagatatgatcataggggttcctaaagagataaaaaacaatgaaaaccgtgtcgcattaacacccgggggcgtttctcagctcatttcaaacggtcaccgggtgctggttgaaacaggcgcgggccttggaagcggatttgaaaatgaagcctatgagtcagcaggagcggaaatcattgctgatccgaaacaggtctgggacgccgaaatggtcatgaaggtaaaagaaccgctgccggaagaatatgtttatttccgcaaaggacttgtgctgtttacgtaccttcatttagcagctgagcctgagcttgcacaggccttgaaggataaaggagtaactgccatcgcatatgaaacggtcagtgaaggccgggcattgcctcttctgacaccaatgtctgaggttgcgggcagaatggcggcgcaaatcggcgctcaattcttagaaaagcctaaaggcggaaaaggcattctgcttgccggggtgccgggcgtttctcgcggaaaagtaacgattatcggaggaggcgttgtcgggacaaacgcggcgaaaatggctgtcggcctcggtgcagatgtgacgatcattgacttaaacgcagaccgcttgcgccagcttgatgacatcttcggccatcagattaaaacgttaatttctaatccggtcaatattgctgatgctgtagcggaagcggatctcctcatttgcgcggtattaattccgggtgctaaagctccgactcttgtcactgaggaaatggtaaaacaaatgaaacctggttcagtcattgttgatgtagcgatcgaccaaggcggcatcgtcgaaactgtcgaccatatcacaacacatgatcagccaacatatgaaaaacacggggttgtgcattatgctgtagcgaacatgccaggcgcagtccctcgtacgtcaacaatcgccctgactaacgttactgttccatacgcgctgcaaatcgcgaacaaaggggcagtaaaagcgctcgcagacaatgcggcactgagagcgggtttaaacaccgcaaacggacacgtgacctatgaagctgtagcaagagatctaggctatgagtatgttcctgccgagaaagctttacaggatgaatcatctgtagcgggtgcttaattcacaatgagcttgcagaaagatttctgcaggcttttttattttttaaaaggaaaaaagagaccatttcacgaattatgactatgaagttgatcataaaggaggattcatatggctgttcagcaatatggcgtgttaaaaggcatagtcttagacatgaagcgggaaacagatgatgacagtcctcatttccaagtcaaaatgctcggtgaagagaatacgtattacaggtgcgccatcaatgtgatgtccagttctgaggaatctgaagtattgtatttggctgacgatcagtttgattcgggctcaattaccatccttccgaacatgccgtatggatatacaaggatcaatgaagcaaaccgtgaagtggcactggattatgtgcggggcaatttgtttgacccgcgggaaatgaagcctttgcctcatgaaatcacaggacctgataatgatttaaatgattttattgaaacctatatgaagaaagcacaagatgagaaagcgccggtttatatattcggttcaaaattcggccctgaacaggctgcagataaaatattcggctttaccccgactaacggaatgcacaatatccatatgaatcaagggaatgcaatggatacgcgctggaaaaaagacaacggctcttggcatgacgggggtattctgattcagtttgcagatcagtgggccgctgtgtttttagcgtttttatcccaatcttggtgtaccgatgaaaacggaaacccggtcagagattgtgatcatacccaaacgtctgcgtaagatagaaaaagagactgcggcgagcagtctcttcggaagtttgttgacaaaatcctaaagcgttttaaaagctttaggattttgtcatgttttcagcgtgattgaaaacccttgaactctaggaaagatgagcattggagcggagcgaatgttctaattcgtgagcaccaacgcgcagacttggcaacgaatgcgagggtttatcgacacgctgaagagactgcggctagcagtctctttttgatcagattacacattttcaacagtctttaggctgtttggcctcatatcgctccaatgcgattggatatagtccaaacaagcttcacgccctttttgctcatgaacgactgtccagccgcttggcacatctataaaaccgggccatagggaatattggccttcttcattgatcagcaccaaatatgtgccatccgcattttcaaaaggatttgccattctatttctcctcccttatttattcaactcttccagtttgacagcgagaaccttgccgatttgagccagaggttccggctgacataaatctttatgacggcagtcgatgtcgatttgttcaatctgtctgctaatataaggcttccaagagtcaggttcaatcgggtcaaaccattcaggaatgattgttgatctgaaaaacaaaacatttccatggaaggttttcggcttataggaacctaaaatgccgacagaattgacatacgtattcttcaaatttaaaatgaccgtttcatccaggctcgcaagcgcactgccgtcacggcgaagaatctcaatcgccgcttcaaaatctagcggtttgtcccctaagctgtctggatcgtacccgcctaacgccagaagggcaataagcgcttcctcatcatccggtgcctcttttataggaaggaagtggttcggataggcgtccagcatcaccaacagggatacttcttctccttgattttgcagctgggtagccatcgcttgaacgacattcccgcccagggaccagcccagcagatggtatggaccttttggctggaccgttcggatttgtttaatgtaatcggcagccatgtcatcaagtgttttcggaagctcctcgcgctgcccgattccccgtgcctgcaagccgtagattggataatctgttcctatattggtcatcaaaccggcataacaccagctgagcccccctgccggatgaacacagaataaaggaggcttgtctccacttgttcggagcggcagcagaacgtcaagagcgctttggcttgatcccatttcaagtctttcagcgagcccggctacagtaggtgcttcgaacaagttgccgatgctgagttcaacgccgagcgcttcacgaatgcggctcatgagctgtacagcaagcaaggaatgtccgcctaaatcaaagaaacggtcatcaatgccgacacgcggcaagtgaagcacctccataaagaggtcacagagaatttcttcctgtggcgttctcggtcctcgtcctgtcactgccgctgcgaaatccggagcgggcagtgctttacgatcaagctttccattcggtgtcagcggcaattctttcatcatcacaaaggccgcaggcaccatgtaatccggcagtctctcagcagcatatttgcgcagttccgccgtatcaaatgtttcttccgaagggatgacataagctgccaaccgtttatctcccggctgatcctcacgaacgattactgccgcatcttcaagctgcggatgctgaacaagcgcggcttcaatttctcccaattcaatccggaatccccgaattttcacttgatggtctgcacggccgacatagtcgagagaaccgtcagcgcggaggcgggccacatccccagtgcggtacatccgggtgcctggaggaccgaacggatcagctatgaagcgttcagatgttaaaccaggccggcctagataacctcgtgctaaccccgctcctgatacatacagctctccggcaacacccggcggaaccggctgcaggcgttcatccagcacgtatacaccaagatcgggaatgccgcagccgatcaagctgtttgcccgtaaagctgccatgcttcggtctaattcgatatagctcacatgcaccgtcgtttctgtaataccatacatattgataagctgcggtctattttcagggtggcggttgtaccaatcctctaaacggctgagttcaagcgcttctccgccaaaaatgacatagcgcagactgagtgcctgtccgagatccggctgttcccgttccgcctgcataaactgatagaaagcagacggtgtctggttcagaacggtcacaccctctttgacaagcaggcgcagaaacgcttctggcgatctgctgacgtggtgaggcacgattacaagacgtccgccatgcagcagaggaccccagatctcccacaccgaaaaatcaaacgcataggaatggaacatggtccagatatcatctgagctgaaacggaaccagtgctcggtcgctgcaaataaacgtgttacattttggtgaggaatcatcacaccttttggaacacctgttgagccggatgtataaatgacatacgccgtattcaaaggggaaagcggctgagtcctatccttattttttggattacctgcagggtacgtgtttagtttctctgccagctcgggatcatccagcacgattttcggcacgttttcaactggcggaatgtgatttgcagctttagtgttcgtcatgataaacgcaggctgtgcatcttttagcataaaagcaattcgatcagccggataatccggatcaagagggagataagctgccccggcctttagcaccgccaataggccgacagccatttccaacgatcggggcagtgccaatgccacaaattgctccggcccgacaccttcactaattaggaatcgggcaagccgatttgctctttcattcagctctgcatagctcagtgcctgatcttcatatacaacggcaatagcatcaggacgtaaagcagcctgcttctcaaactgctctggcaaacttgcgtgcggaatcttttcagatacactttgccaatctgtcaccatgctgctgcgttcctctggcgcaagaatatccagatttccgatttgctcgtcaggatcagactcggcagcctccaacagccgcatcaaacggtcagcaagagcctgagcagtttcccgcttgaaaagatcagtgctgtattcaagcagtccttccattccgtttggtgtcccgtcagcaaggcgatcttcactgatttccagcgtcaaatcaaacttggcagaaccgacactgttgattcgcaggctactctccatatcaggaagatgcaattcagcgtccggtgtgttttggaacgcaagcatgatttggaataaaggatgcgtcgcacgcgaacgagccggattgagcacctctacaagtctctcaaacggcagatcctgattgtcataggcggccagattcacttcccgtactctgtctagaagctcacgaaagcttgggtcaccggacgtatcagttctgagcaccaatgtattaatgaacagccctacaagatcgcccagcgcatcatcattccgtccagcgatcggactgccgatcggaatgtcggtgcccgccccgagccttgtcaataaagcggcgagaccggattgaagcaccataaacaggctcaccctatttgcgcgagccagctcctgcaatcgcttatgaagctcgggctcaatacgaaaatgaatcgtatctccatcatgactcggctcagccggacgtgaataatcggttggcagctcaagctgatcaggcaggtttttcaaggtttctttccagaaagcaagctgtccggcaatcaagctatttggatcatcctcgtttccaagcagttcttgctgccaaagcgcatagtctgcatactgcacagcaagaggcgcccattctggagatcgtccgtggcagcgagccgcataagccgtcccaaggtctcgggtcagcggtgttaaggaccagccgtccccgacaatatgatggacgagaagaagcagcacgtactcgtcaggaccgatcacaaaaagctcggcacgaaaagcaggttcagctgcaagatcaaagctgtagcgtacagcttcggcaagccgatcagaaagctccttctcagcaatttcagtaacatgtaactcgggacaggcttgatcagcatctaaaatatgctgataggatgtcccctgtgattcagggaagattgtccgaaggctttcatgacggcagacgaggtcataaagtgccgctttcagcaatccttgatccaactcacctgacaaacggacagcaaccggaatattataagtaggactcggtccttccagacaatgcaggaaccatagccggcgctgggcaaatgagagcgggatcttttcaggccgctcagctctctgcaaagcgggacgtgcactctgcgccaaatcaagatgggcagcgagtccggctactgtcggttcgtcaaagagcttggcgataccaagttcggctcccattacctcgcgaatgcggctcatcagacgggctgcaagaagagaatggcccccaagctcgaagaaactgtcatcgataccgacgcgtgccaaaccgagaacctctgcaaacaagtcacacaatatctcttcctgaggagtccgcggggcccgatcactgacagatgtgctgaagtctggtgccggcagtgctttccggtcaagcttgccattaggtgttaacggcagctcgtccatctccacaaacgccgccggtaccatataatcaggaagactggcccccatataacgacgaagctctgcagtatcaatagcagtatcagcgactacataagccgccaatcgtttgtctcccggctgatcttcccgtacgacaaccgcggcctgttcaatgtgcgggtgattggcaagcacggcatcaatttctccaagttcaattcggaatccgcgaattttgatttgatgatccgcccgcccgatataatccaaagacccatcggcgcgccagcgggcctggtctccggtccgatacatccgagttcccggcggtccgtatggatctgcaacgaagcgctccgccgttaaatcagggcgatggaaataacctctggccaagccggttcctgcaatataaagctctccgacaacgcccggcggcaccggctgcaatccattatcaagcacatacacctgcgtgttccaaatcggtttcccaatcggaggaacgccctgcaacccttcttcaagaaaagctgcggcagaccaaatcgttgtttcagtgggaccgtataagttcgtgactgaacaatgaaggtcttgaagcgcctgcaaaagaccgctcggcagcgcctcgcctcctacaagcactctaagcccccgaagtttctcaggttcactcgttaccaaagcgtgccacagtgtcggtgtcgcctgcatgatgttaatatcgaaattttcaatcatttgagctaatgcctgcggctcacggatcgtttcttttcttgcgatcacaattcgcgctccgctaatcagcggaagatataactccaatgctgaaatatcaaaagcgacagtcgtcacagccaacagcctgtcttcttctcctagagaaaacgcctccttcatggacagcagaaaattgtttaagcttttctgtgtcacaacgactcccttcggtcttcctgttgatcctgaggtatagatgatatacgcaggatggtcaagagaaaccgatacatccggattttccggcgaatagcgttttataatctcctgtgtaacagcctgatcaagcacaagctccggtacagccaggttatcaggcagactggctgctatttcctcagtcgttatgatgcatgaaggtttcgcatcctccagcatgtaagaaatgcggtcggctggaaactccggatcaagtgggagatacgccgcaccagtcttgagcacaccaagcattgagaccaccatctcaggggaacgcggcagcgccaaagcgacaaattgctccggaccaatccctttttcgatcaacagacgcgcgaggcggtttgcctcttcattgagctttcgatagttgacttgaatgtcatcacacatgagagcgatacgttctggcgtaagaactgcctgcttttcgaacatgtcctgaaggctgaccagcttctcggattttgccgtctcattccatttagaaatgactttttctttctcctctggcaacagaagctccatttgcccaatcagcatgtcctctccggcagaagccgtttgcagcagctgcaaaatacgctgctgatgaagcttaatatcagactcactgtatacctcgggattcgcatcaacatcaattcgcagcccgctgccgtctgttctgtcatatacattgattgatagatcatcaacaggaccggctgaaagattatgcgttgtgccccggacgccggcaaagtcgagaccgtaatcaaacggcataagattgatttgagggccaaataatctatgattttctcctatcaatttcagatcgcgccgaagctcttcatggcgatacttatgatgtcgccgaatactgcggatttcccgggaaatttgctgaatcagttcagaaaagctcatcgaagagcttaccgtcagccggagcgggagaaggttcatcaccatagccggtacattcagtgacgcggaccctatccgacccatcatgggcaggccgagcacaacatcctcagagccggtcatacggtgcacataaacagctgacaccgcaatcatgacttcatgccagcttcctgagaaatagcgcgccgcttcttttaacgcgtttacatcagacggaggcagatatgccgtatgacgaagaaaactgttagatgttcttggcgcccgatcagccaagctcacaacttcaggtgcatctgcaaaacggtccagccagaattgacgatccttctcatactgctctgatccgcgataatctgtatcctcctccaaaatggcctggagagacccaaaggaacggcctttagctgtttgtccttttataagcgcagtatatgtacttgccacacgctgggctatcagggaaaaaccgaagccgtcgatcgctatatggtgaatgcgctgataccaaaagaaacgatcaggcccggcaataaacagagcttcattgaacaaagggtcataccctaaatcaaccggctttgctaaatcagctttcatccagtttaatgctgttttttccggatcaggctcagagctgacgtcaatgacgtgcagctgtacatccggagacgggtttatcatctgccaaggcccgtccatattttcaccgaagcggacatgcagcgattccgcttccttgatcacgtgccgcaaagcttcttcaaaaagagcaatattgactggtccattgatttctatatattccgctgtattgtagattggattgtccggatcaagctgctgagcaaaccatatgccagtttgcgccccggtcaaagaatattgaagatcttttgtatcaggcatccgtttgtttaccctccttttataaataatccgcgtttggcagcacttgctggctgcgggttgtgagcaatttttgccattcttcgatcgttgggcgttcagccaattccacgaaagtcacctctgccccttcacggcgccattgttccaccaatgtcatgatccttaccgaatcaagaccacgatcgagcaaatcctcttgatctgtgatgtcttccggtgtttcttgtagaagctcagcaatttgtttacggatattctcacatgtaaacacgttctttttgccagtgtttgctgacgttttttgaacgtctgccggcgcattctgcagctgatcaagaagactgtcagtcatcacggtaaacgcacagcgtccagccgcatagtccagcgccatttgatgtttttctaatgaaaaatcagcaactgcatctcccacaaaaaaggctttaatatcctccataaatgcttcacatgctgtaacaagacagccgatatgggcataaattcctgtaatgatcagctgatcgcgtccctctttgcgcatcatttcaagcagattcgttctcttaaacgcgctgtatctccattttgtcagcacaagatcatcatcctctggtgccagctcggttataattttctcctcataaggaccgctgtttaatcccgggccccaaaagtctgtcagcagcgcacggtcatccggattttggcttcccggctgtgcggtatagacaacaggaatcccaagctgaacacattgattcttcagctttcgtatattcgctgaaagctctattaccggagacgctcccgctgtgaaagcatcgacaaaatagttttgcatatcgtgtattaacaagacagcccgattcggatcaggcacccatgatactttgttttgcggcatatcagatgctgtcggcatttgatacggctgaatggcaggtatagccatatgaacacttcctctcaaattgttgttttatttttttaatcctgcaagaagcttctcggaaatggcttcacggagcgcttttttgctgacttttcctacccctgtctgcggaaaggattcgacaaattcaactcgatcagggattttatatgccgccagtccgcgctctctcaaaaatgctttgagctctgcggcttttggggcttcatcccggggaataatgaacacacaagatctttcgccaagaaattgatcaggcatggagaccattgccgcatcatggacagccggatgcgccagcagatgattttccacctcttcagccgcaaccttttctcctccacggttaatttgatccttcgcccggccttcaacgacaatatacccgtctcgtgtcagcctgacgatatcacccgtacggtaaaaaccgtcctcagtaaatgaagcggcgttatgctcttctgccttatagtaacctcgaattgtatacggtccccgcgtcagcaaatggcctgtttcaccaggttttacgtcgcgatcatgatcatcccaaacacgcacttcatcatatggggacatcggttttccttgggtgttgacaatgatctcctcaggatcatccaatctcgtataattgacgagaccctctgccattccgaacacctgctgcagcgtgcagccgaaaacagcttttaccctgcgcgcggcttcagcactaaacttggcaccgccgacctgcaacacttgaaggctggataaatcgtcacggcgtgaggatgccgcatccatccataccatcgcaagaggcggaacaagagcggttatcgtgaccttttcccgttcaattaaaggaaatgcgtcatctggacttggagaaggagataataccactcttcctccagcgtataatacgccgagaacgccaggtgagctcagcggataattgtgtgccatcggcagcgcggccaagtacaccgtgctgtggtcgagccagcagacctccacactccgcttcaggctgtatatgtagtcatcgtgggtcctcggaatcagtttcgatagcccggtgctcccgccagaaagctggaggaacgccacatctgaagatttgacttcaggcagttttacaggttctgtatgcaaatcctccagcggcaaaaattcctctgcctcacctgcgacaatgatgtttttcaaagtcggcagcttgctttgaacctgtctggcaagcgaacggtagtcaaaaccggaatatgcgtcgggaatgatatatgcagccgcttcagcaaactcgcaaaaatatgtaatttcactgcttcgatgagaaggcagtgcgaagactggaagcgcccccagacggaatagcgcgaaaataacttcaaaaaactctttgatatttggcagctgcaccacaacacgatccttctgttgaatgccgagcttctgaaatccggcagccaggcgatcagcccttgtgtccagctctcgatagctccaatgggtgtttccgcatgtaatggcaatgcgatcaccatatttggctgcccggtcccttaacaaatctccaaacgtctcaccggcccagcagccgttctttcgataggtctcagctaactcatcaggccaaggcgtaaatcctttcagcatgttgtatccctccagcaattcattctgttcatatgtgatccacgcccattgcccgcagcattgtccgaaactttgcggacgtctcctgaagctcgtcctcgggctttgaaccggccacaacaccagctccagcatacaggcggagtgagcgttcttctgcttctgcacaacggatggtcacgatccattctccgtcaccggcatcgtcacaccatccgaccatgccggtaaagaaaccgcggtcaaatggttcaatgctgagaatcgcttctcttgcaagatcagtcggtgttccgcagactgctggcgtcgggtggagagccgctgccaattcaagtgcggttacagacgggtcggaaagctctcccttaatcacgctggacaggtgccacatcgtttccgttttgatcagtgaaggcttctccggaacctccagcgtccggcagaaaggtctcagcgctgccgcaaccgcgtcagcgacaaccgcgtgctcatgaagatcctttgcggaagaaagcaattcagctgcccggcgctggtcttcaacaggatcattactgcgcggccttgagccggctaatgggttggaaacgacctgtgttcccatccttgaaacgagaagctccggacttgctccgagcaatgttcggcggggagacgtttcctcctgactggacacgtctgcggcaaacgtgtagccatgcgagttatgctgagccagatggcgaagcaattcatccgtctgaatcggttcaggcgatgtcaaatgcagcgacctggacagaacgattttgctgagtgttccatcggcaatgcgtgccagcccttgttcaacaccatttttataatcctcaggttcaggaacaggctttatgtgatatgtatgcccagcctgctgttccttttcctcatgatcaaattgaagcggtcctgaccagcgcacttcttcaggtacaacgagccgcgctgcttttacttgatcaaaaggaacggccccgacaacaagcggccggctttgccctgattgttttgcctgacgtaacgcctctgcaattcggccagaaagggtttccatttggttttgcccgtctgcctccggtacgatttcacatatgcctttcgctaacagtacacgatgaggagacgctaagaaaaaggcgcccggctgatattcatgaagcaaatgctccgcttttgtttctgttataacgttttgatccaacattctcatgaacctcctttaaattcagttacacgcctaaggtcgcgccgccatctacgcataaattatgcatcgtaatatgccctgcctggccagaaaccaaaaagagcaccgcatccgcaatatccgaaggcttggctagttttttgagcgggatccctgttttaaatgtctcaagtgatccttttatgacttgctccgctccattctcgtcggcccataatgaccactgcatgtctgtttccgttgatccgggagatacaatgttgcagcgaatattgtattctgcaagctcaaggccaaggcatttcgtaaacatcacagccgcagcctttgaggacgcatatgccgccatagatgttcttggtacaccggcagcattcgatccgactgttacaatcgaacccgatcttcggtccatcatatatttgctgactgaacgcgaggcgttaaatacgccagtcgaattcactgagaacgtcgcctcccattcctcatcgctaagcgaatggatcagtcccgggcgaaggacacccgctacattcactaaaatatcaatcggccccatttcacgttcgatgcgcgccgtgatctcatcaatcgccgcgctgtctctcacatccgcaggaaaagcttctgcatggcggccttctgctttgaggctgctcacaaccttttccagcttttcaggattataatcaaccgccgcaatatgtgcgccttgactagcaagcgtccgcgcaacagcttcgcctattccttgggcagcccctgttataaaagcaatttttccctctatactctttgcattcatatcatcaattcctttcttcgctctaaatgccgaacagacatccagcgaaaaagactgctgcgccttgaaaaacgcaatctattgataatgattatcattatcaattataaaaataatcatatccaaatgtcatgtgacagtcaaatataatttcagtgacaaatatttttttaaaggcaaggctgagtatgtctcagcccattgatagatgcggtccgtcagggtgaagcgcaaaacgcagcgccctgctgaccaaaacaggaagaactgaaatatgtccttctcctgaaaactcgcaaaattctgcccgtatgccttgttcagataaaacggccagccgctcataaagctcccttgcattatcattcatccggcttttatgatgctgctctaattctcctgcggcaagcaggatattgataggctgattgtttttcttggtgagagagacgaaatggtccgttttctcgagaataaacggtttattccaatgaatggacggacttcctgcgatatacgtttgaaacgcatcgggctttgttagcagcacctgcagcacgaaaagccctccgagcgaatggccaaagattgtttgtctttttttatcaatctggtaatctcgttctatctccggttttaaatcctcttcaataaatctgaaaaagccctccgctccgccatgctccggccattctctgccgtcgggcctttccggcagcttcgattgggctgttggcattgtaaaatcccggtggcgtgctgaagagaacggctccgctgtctcatagccaatgccgacgatcactgcagggatcaccccggttttttcgggtcggcgtccctgtattcgaacggcttccgtcatcgttccgaagacagaattggcatccagcagataaatcacaggataaccagtgggtggcggcggcgtactaggtttcgagataaaaatgtgataggtacggttttcattgcgtgaagacatcatacgcacttccgtaccaggaatcgtaaatgcgtttgatgtcccgctatttgtccggtctgttgtttgctctttcatgcagtacgacattcctctccttaaactaaaccgcaatgtatgataatgattttcactatcaactagacacctcaaataataggttttcttccaaagaaagtcaactttttcccgaataaaaaaggcaccttgatcaaataaggtacctgcagactatcaatatggaagtaaaaacctaataaagatgcggattgtcctatttgaaatagaaccttaatcccatgtaaacctttgattttgccaagggtcgcctctcatgtgatagccattccgctcccaaaagccagggtgattttctttcgtaaattggatgccgcgcagccacttggcgcttttccaaaaatatagatgcggaaatacaccccgcagcggaaagccgtgttcaggggttaaaggttcgtcattatgcgcataagccagaagggaagtttccgctaagaaatcatcaagcggcagattggtcgtccagccctcttcagcatgtaaaataacgtagcccgcttcttcttttacacccgctttttccgctatatcacaagcccgcaccccttgccacacattatcaagccttgaccatcccgtgacacaatgaatgtcgttttttgattcataccgtggaaaggctttgacatcttcaaagcttagcagcatcggatggtcaaccaaaccgtatacttgaagattccatttcgtcatatcttcgtaatatgggacatctccggtatgaagcacaggaaatgaagtggtgacgttttgatttggcggcactcttccagattgatcggactgtcttgtttttccgaaatacatatgggcctcctttttgttaacctattttaaaatcatgttgacaatctttttgttctttattactctatgattgtgtatgtcaacctaagggggaacaacgatgaaacaacgtaaacttcgtgcgggagatatggcgctgattggcatgttcgccgcacttatggctgtcggggccaacattacatcagtagcaccctttttacaagtagccggcattccgctttcgatgcagccgtttttctgtctcttggcagctttgcttcttggcagcaaacgagcagcgattgccatgattgtatatgcacttgtgggattggccggagcgcctgtgtttgctcaattttcagcaggcttcgcaccgtttgcagggaaaagcggcgggtttattatctcatacattccggcagcatttgtagcgggatggtttttagaacgaaacattcagccaagtaaaattcgatttctcattgcttcacttatcggaacggcgatcatgtatctcatcggcactacctatatgtatcttgcactgaagctgtggattcatacgccagtgagctacggcacggcttggggctttatgatttggtttatggtaaaagatacagcgctggctgtgatactgtcgtttatcgcaccagcaatctaccgctctattcataaagcaaccggctttaacagaaatcacatatcatctacgtaaaaaccgttctattggacggttttttatcataacgagaaaaggctccccagtaaaggggagcctttttcctataaaacaagcgctgcaatccagccaaagatgacaagcggaatattataaaatataaatgtcggcacacaagtatcccaaatgtggtgatgctggccgtccgcactcaaacctgaagtcggcccaagcgtactgtcactggcaggtgaaccggcatcgccaagcgcagcagcagccccgataatcgcaatcgttgccatcgggctgaatccaagctgcatgcatagaggcacgaaaatggttgtgataacaggaatggtcgcaaaagaagatccgatccccattgtaattaataagccgacaatgagcatcagcaatgcgcccaaggactgactgtgtccgataaaaccagctgacgttttgaccagtgactcgacatctccggttttcgtcaatacgtttgaaaatccggctgcaacaagcatgacaaagccgataaaggccattaaaaccattccatcagtaatcagtgagtccgcttcatcacgcttcatcacaccgctgacaaacagaacaatcagaccagcgagcgcccccataatcattccttctactcccaaagtctgagataagtaaagctggacgccgagtgacacaacaatggctagaaccgcgataccaatgctttttctcgtatatggcgatgcttctgcacctgaaatgtcttttgtttcatattgtttcggtttacggtatacgatcactgataaaataaggccgacaaccatacctgcaactggaataatcagtgcgtacggaatatcagcaagcggaacgtttaacccggcatccgccatattgtccttcagcatgccttggaagatttggccgaaacccaccggaagcaaaatataaggagccgttaagccaaatgtaattacacacgcgatcagacggcggtccatttcaagttcattaaagattttcaaaagcggcggaatcagcaccgggataaacgcgatgtgaaccggaacgacgttttgcgaaaaacaagatacaattaaaataatcagcacaatcagcaccttagaaagtgctttttttcgagaatcttccttatttccgattaatttaacggaggcttccaccattgcgtccggaagacctgttttcgtcaaagcggcggcaaacgcgccaagcatggcatagctgactgcaacggtggcatttccgccgagaccgtctgtaaaagctttaaccgtttcgccaagaccgagcccgcctgttaacccgccggccaaggcgcctataattaatgcgataacaatattgacacgcagcaggcttaatacaagcataagcaggactgcgatgacgactgcattcatgatgatacccctccaaaaatcctttagtttgctaatgtagtagataaataaagtacgaacgtatcgtatcataaccgatccactttagtcaactaaagatttcggaagaaaaaatccctgccgcatcatacagcagggatttttcattactcgtttttatcttcttccaatgtaaatcgctccgcaagtgtagccagtgttcttgccataacgccagtagccccggccggcccgaagcaggttgctttattggcagtcgctgttcctgcaatatcaaggtgaacccaaggtgttgactcagcgaattcaccaagaaacgttcctgccataatcgcatgtccctcgcgtcccggtgaattgttgagatccgccatttggctgcttttcacgcgttttttatccttctctgttatcggcagctgccagattgcctcgccgcactcttgtgcagcatcagctacctgctggtaaaagctttgatcatttgtcattgcaccggttgtttcagttcctaatgccacaacgacgccgccggtaagcgtagctacatcgacaagaactgacgcgccatgctgtttcgcgtatgtaatgccatctgcaagcactagccttccttcagcatccgtattaaggatttctattgtttttccgcttaaagatacgatcacgtcatccggcttcatggccccgccggagatcatattatcggttgatggaataacgcacagcacgttttgctcaggacgaagctctccgatcgtttccatagcaccgagaaccgcagctgctcctcccatatctgatttcatgccgacaattccagatttcgttttaatggagtagccgcctgtgtcaaaggtaattcctttcccgactagtccgacgacgtcctcccattcctttttgccctgatatttcaacacaatcattttcggcggttcggtggagccttggtttaccgcaagtattccgcccataccgagctcttccatctctgatttctccaatatctcacactcaaaatcatatttcgccgcaagctcttcagcatacgaagcgaggtcagtcgctgtcagcatgtttcccggcatattcacaagcgttctagccgaatttgtcccttgtccgtatgcctggccgacgcgaagcccggcctgcacttcctgtgtatcttcatctgttacaacatacacggcttcaatttgtttgtcaggctcatttgatttgtgcttataatcctgcacctcataggaagcaagcaggcagctctcagctaaagcatgagcggcatcggctggaggcacgtcttccgaaataaacgtatcaagcaggacagcagtttcttgttttcgatctttatgaatggcttgaaaaacatgagcaaaacgttccttcgcctgttcaaacgaataattagcttctctccccagaccaacgaaataaatccgtttcatacccgcagaagatggagggaatacttttgatacttgattcggtttcgcagagacatcaccctcttttaaaagctgtgtcagatggccttcgagcatttcatcaatttccaacgcttttcctgtcagctggcttttttgaaaaagcccgaccacaagggtttctgtatgctctgattgttgaaccgcataaaacatgaggcttacactcctaacgtaatgggtatttgtaatgaacaatggtataataggaaaaacattctttccactatacttattttaacaaacaacagtctaagacttgcttttttcttttgaaacacgaaggatttttcaaatagaaaggatgtcgccgatggaacttttaacgaattttcctttattatcaagcctggccgcaattatttttgctcaggtcatcaaagtgcccatacagtttatcgtgtccagaaaactggactggtcgctggtcacaagcacaggcggcatgccgagctctcactccgcagcggtcactgcgctttctacaggcgtagccttggagcatggattagactcctcactctttgcggtttccgccattttcgccgtcataaccatgtttgacgcaactggcgtcagacgccacgccggtgagcaggcaacagtcattaataagcttgttattgattttaaccgtttcgtaaatgaagcgaaggacttccctaaggctgcagagaaagaaaagcaaaaaaagctgaaagagcttctcggacatcagccgatcgaagtctttttcggaggcctaacaggtattttactgacattggtactcgcttactttttcatgtaaaaaaacgctcctgctttcgctggagcgttttattctttcacagttttatattgatttctgaacacttgcaaagattttgtttcattgagcttctcaagctcatcctcggtaatctttcccattccctttttaatcacatatacatcaagggtttttttgccccattcattgtatacatctttgactgtctcaaagtacagatcaaggcggtttcccttaatagctgatcctgtgtcggccacaactccgagaccgtagttcggaatgaataaaattgttccgatcgggaaaacggacgggtcagcagcaaccgtggaatataaatcccgtttcactttcacacctgaatatgtaagcccgtataatggatcaccgggatttttgcccgtcgactcagctcctgctgtgtagcctgttgctgttactctttggactggatattcatcccaatcaaatgcctcttctaacggttttgttttatcctcagccgcggacgtggtttgtgtttgtttctgctgcaatgcttttaatgtcagtcctgcatgcttcaagtgcttttcctgatgttcctgcacccattttgacaagtccttcgcttcaattcctgacactgataaaaatgtcgtgccaaatgcaagcagaaataaacaggtcatcagcaaacgtctgatcatattcaacatcattcacctctcctccgaatcattgttcccaagtggagagagcattattcaaaatggtgaatgagctgaacgcataaaaaaagctttctttagaagaaagcggcatttaaaacatttgatatcctctttttctgagcatgttgatcgctataccggacacgatggcgccggccaaaccgctggctaaaatcagcacatcggcagccgctaatgataagacacgatgaaacagactggcaaaggattctcccggcgactggacatagctgatcagcttttctttgctgataatgaaaaggcatacaatcggataaatcacagccataatccaagacattctcagcagcatgtttaataagaaaccgattccaaaaaacaagacaaaaaacaaaacaattgagatgattacgactggcagactaatcaacctattccaccccctgcgttgtttttagtgtaacgcgggggctgaaataaagtcaacggctggaaaaagaatgactgtcttttcctgtcccctggcaagacggacaagtctctgaaccgccgagaatcaattgaaaatatcctttccctgaacaaaatgggcatgcatgtgaagcggttgtcgttgcagttttcatctaatcatcacccttttttctcaattttctgataatataccatatcaagctgtcaacaataaagtcagatcatgtgacaaatcttttgatgtaagcggaaacatacttgttttcctctcgttctctttttattttggcgttttttaataaagaaaacccgcttccgcgggtttttagaaaaacttgaacttgccttttttcaatgtcagtccgagtccgccaatcataaacagcgagcggttatcaatgacttttttcataaacgaagcgggcgtgcctttcagctttctgccataaacaaccccaaccgcgttatgctcgccaagagaagccactgttcccttaatgtccggcttgaattcctcaagctctccgcctttaataagcctgccaaggtttttagcgaccgttatgccctgctgcattgcaatttgcgcagtaggcggatacggacgctctgtatcttcattcataaacagcgagctgtcgccgagaataaagacattgtcatgtcccggggcgcgaagatcagggttgactttcacccggccgcgcatattttcaaaaccggcttcctccacaatcggatggccgcggacacctgccgcccaaacaacggtttgcgatttgatctgctctggttcctcatcttttttgccgactctgactccttccggggtacattcttgtacagccgtgccgatcttgaactcaactccgttttcctcaagataatgtacggcgtaatcaacaagttccggatcaaagcccggcaaaacggtcggcgctgcttccacacaaatgatgcggacaaggcttctgtcaacgtcatattccttacagagctccggcacgcgagcagccagttcgccaagaaattcaattcccgtaaatccggcaccgccaacaacgatcgttaacctgtccggccgtttttccgcttccgtattgtaagtcgcaaactgcagctcaatatgttcccgcagcaggcgcgacgtgttgatgttggcaatcggaaacgcatattcttttaagcctttaatgccgaacgtttcaggcacggcgccgagcccgatgactaaataatcgtactgcagttctccattcgcaagcacaacttttttctcatcaattttgattgcctttacggtatcctgtacaaaattcacccgtgactggttgattacatcttttatctgataacggcagcggtcatgatggagcgtacccgcgctcgcttcatgcatccatgtcgtttcataatgataattgtgtttatttacaagcgtaatgtcagcatcattcggcccgacatacttcgtcagccttgtcaccgtcatcaatccgccatatcctgcacctaaaatcacgattttgggcttattcaatgccatcacatccaccttctctttttttgcttttgttagacccataataaaatcatcatttgtgttagcttcagcttattggcgggattttatgaaatatattgaaaagttttttgtgaagtccttacccgtagcactattatcatgtttatccggctggcccaagaaacattcagaaaaagatcatttcatttggttattatcgtagcggcctgcggaaatattttcaagaacggatgggcacgttagatccttacgattttttctgctgactcgtcaatttgaacggcaatatggtataattaataacaattttcatttaggaggcaattttcgtatgcgagaggatacaaaggtttatgatattacaattataggcgggggaccggtcggcttattcaccgctttttacggcgggatgagacaggcaagcgtcaaaattatcgaaagcctgcctcagctcggcggacagcttagcgccctataccctgagaagtatatatatgatgtagcgggattcccgaaaatccgtgcgcaagagcttatcaataacttaaaagagcaaatggcgaaattcgaccaaaccatttgtctggagcaagcggttgaatctgttgagaaacaagcggacggcgtgtttaagcttgtaacaaatgaagaaacccactactctaaaacggtcatcatcactgcaggaaacggcgcattcaaaccgagaaagctggaacttgaaaatgccgagcagtatgaaggcaaaaacctccattacttcgttgatgatctgcaaaaattcgccggcagacgcgttgcgatccttggcggtggagattccgcggttgattgggcgcttatgcttgagccaatcgcaaaagaagtatcgatcatacaccgccgcgacaagttccgtgcgcacgagcacagtgtggaaaaccttcatgcgtcgaaggttaatgtcctgacaccattcgtccctgcggagctgatcggcgaagacaaaatcgaacagctagtgcttgaagaagtgaaaggcgaccgcaaagagattttagaaattgatgacttaatcgtcaactacggtttcgtttcatctcttggaccgatcaaaaactggggcctggacatcgagaaaaattccattgtcgtgaaatcaacaatggaaacaaatatcgaaggcttctttgcagcaggtgacatttgtacatacgaaggaaaagtcaacctgattgccagcggcttcggtgaggcaccgacagcagtgaacaacgccaaggcttacatggacccgaaagcccgcgtacagcctcttcattcaacaagtctttttgaaaataaataaaaaaaaggagcttgtgtctgcgacacagctccttttttatttgaagatatttatataattcaatgcagttcctacaaccagcgcaatcacaagggctgcgactacccagatcattgccataataatgcggtcctgaatcttttgggacttcggtgttttttcttcgttttgggccatcttattcgctcctttcctatgtccatgccataaagaaagcctggtgctgaacgaccaagctttgctgaacgtatatcattcgcgttttgatccgctctctaagaccattcgttaaaactatgatacctaaactcaccctgcatgacaagcttcggcacttgcaccacacctgccagcaaatcataatgtttgacatcctaaataaaacagagtacattatagaaggcgaacatttcatatattatacttttaaatattcgtttttaggagtgaaaaccatggaaaacgtatttgattacgaagatattcagctaattcctgcaaaatgcattgtgaatagccgttcagaatgtgatacatccgtacgtttaggcggacgtacatttaaattgcccgtcgtccctgccaatatgcagacgattatagatgagaagctagcgattcaattagccgaaaatggctacttttatgtcatgcaccgatttgagcctgagacacgaattgattttattaaagatatgaacgcacgcgggttattctcttctatcagcgtgggcgtcaaagatgaggagtatgaatttgtccgccagctggcagaagaaaatctgactcctgaatacgtgacaattgacattgctcacgggcactcaaatgctgtcattgaaatgatccagcaccttaaaaaacatttgccggacagctttgttattgctggcaatgtcggaacgccggaagcggtcagagagcttgaaaatgcgggagcggatgccactaaagtcggcatcggaccgggaaaagtatgtattacgaaaatcaaaaccggcttcggcacaggcggctggcaattagcggcgctgcgctggtgtgccaaggctgccagcaaaccgattatcgcggatggcggcatccgcacccatggcgacatcgcaaaatcaatccgattcggcgcaacgatggtcatgatcggttcactatttgccggacacgaagagtcgccaggccaaacgatcgaaaaagacggaaagctttacaaggagtacttcggctcagcctctgaattccaaaaaggcgaaaagaaaaatgtcgaaggcaaaaaaatgcacgtggcgcataaaggctcaatcaaggatacactgattgaaatggagcaggatcttcaatcttctatttcttatgcaggcggaacaaaacttgacgccatccgcaacgtggattatgtgattgtgaagaattccatttttaatggggataagtactaatatgcgaaaagcacccggatttgggtgctttttatgtgtaaaaaaatgttatatggtatattttagtaataaaaaatccttgtttctacattctttcttatcgtatcttagcgtcccccaaaagcttgtccaattaaacttgaaacatcctcctcggccagttcgatttctagtcggtgttaataaatacatgacatcaaattttgaaataagtaactccatttttataatttttccagtagtttcgtaaaacccacctagactccatacctcctattaagaaaaagttatttcattttccaaattatacatttataaacttgtcttcttttccactcgattctttagccatctatatacatttgctatattaatttcaaaaccttttccctctaattttgttagagccactgctcctccaaatacctcttccttatcttcctcttctgatagagcttttgttaccagagaagcttgaagtattgttgaatcaattatcctttgttgttgctcaaccaaagtttgaagttgttcaattgtttgagtttgcaactgcactgttgcatttaaaaatattatctgactcttaaaatgctggacgttagccattaattgctgaatttgaaggtcacttgagaagttcgtatatccaatatcatttaccattgatggtagctgcaaataaatttctaatgcttcttgtataatgtttaaagcttcatctgttgattctggaattactgtaaaaagtacattatttgcttgatgcgtaatttctgtagttgctttaatacctatattctttaagaattccgaaaaataaataagatattgttcacatgcaacacgaacatgttcagggaattcaaagatactagttagagtaccttccctattttttaaaatcaactgatttattgcttctcttgttacattgttagcgatacgtaaatattcttctaaacaattattagaattattattacaaataaactttaaggaataaccatatatatcagattcaatggtaatatccatccgttttgcgacatcattagcttcatatattaattcttctgtactaaaaatatttttccatttttcagtttcccaagaaaaatcaattaatatttcaaacattttatcatcaggtgaaaaaataaaaaatatactttgtttcaaaccagtaatatccaattcagttgggatttctattgttactgattttttatattcatttgcaagttggatcttattaaatggcatactggttatacttgaaacaacttcatttgcaatgacttcaaaaataatctcaattttataagtgaagagtttcaccttttctggttccatgatttgtttattaatttctaaaaaaggctcacccttataatctttaattataatcattatcttctcctcctttcagacttactttcatcgctcctttagcgctctatatatagtcgtttgcttatattatttaaactgtattaagcttattctcccttttattcctactaccgaataagtctaagggcatgttgattttcttttagtatatttcccctgtctttatttgtaaactcctctcttcttaacttcttcaattcatttgggtgcatcatatttaagataattggcataatcctaaaaattcaggagaataagtcgtttacatttcaatctcgtagtgtttgtgaagccaagtaacaaggagctccaattttactctcttaaggtttcctgtctcaagccttttgcatttttacctgccataactacgccaatttcttattccatagttgatttgtaatattaatttttggctgttttcttcctaactcttatttaataagaaaacttctagatatttatgtgattgacattaaatccagaaggattgtaattcacaattcttattatattttgcgcactaaacctcagaattcctcaggcccacctacatttgttgctttcttgaacaaagaatcgcagacgcagacgaccagtttacgatagatgaaaatacgaccatagcaaggtttatatacgatatgcacaagtattggtgttcgctatcctgccgccgaagtattcccctaactttacctaggttacatacactttaaagtacaattttcacaatatgaaatctctatcccgctctttaattctttctaaaaagaaatacttatatatttttcaatgcttttccattattcttgccatttgttttgcatttggattttcttcattttgcaactgttcaatgatgttcatataatccgtttcatttcggttctggcttaatttatatgccgcttgaatgtcttccaccttaatcttaaatccaacgatacctttcaattcacgttctaagagttttggagaaagcttatcccataaaacaggattgtcacgatgtttttcgtatttctccagcatgattgttaattcttctgctaattcatctttctctaacatacttgcttttccatacatgtggacagcctgataattccacgtcggaacattttcgcgcgaataccaggaagaagaaatataagcgtgcggtccctgaaacatcacaagcacatcttcacaggcttcaaacgttctccactgaggatttccataagcgaaatgccccgtaatatagtaatgatcatcttttttattgaatcctaacggcaaatgtgtggcaattggttttccttgttctgttgtgacaaccgtaccaaaggagttttcttgtacaaaattccaaatttcttcagcatttgtgactttaaaatattttggaatatacatcatcatccacccttcgaaaaatattatatgagtgttttagccatgattaaatccgtttgttcttcatcacccatataaaaagagtgggcgccggtctgaacaaaccccattttcttataaaaggcaatagcattttcatttttttcccacacacctagccaaatgttctttttattacgttccagcgcaatttctatcgctttattcagcagatgtttgccaagcccatttttttgaaagctgttctttatataaattctctcgatttcaagtgattcagcacccatttcttcagactgagcatcatcgatattgacctttacatatccagcgatttcatgatcaaagtaaataaaaaagaattgcgaagacatattggataactctttttccagctgctcagtgttaaatgcactttctaaataggctttcatattttcaggtgagttctgttctttaaaagtgtcattgaatgtttcaatactcaattgttgaagtgtttgtaaatcttcccggctgcattttttcatttttacactcattgttcggattcagcccctttatttaaaattcaattgtcttgtgtccctttttaatatatttaaacacggaacagatactgaccttgttaccattccaaaaatcttcttcatcatcaactccctatcgtgattttgttgcaaatgcaataaaatataccccgcattaaatatagcgtaactttgctgtatttacaacaaaaatcaaacaacaaatcagcgtttctcttgccgaagtccccggtactctctgcatcatttccccataataaaaacgcctcccttaacgatgatttatcgctaagaaaagcgtcagtaatagttgctatccgtttttagtgcttagcactcttcaggcttgcctgcattcgttgctgttctgaacgaagaaccgcagccgcatgaagcgatggcgtttggattgtcgatggtgaagccgccgccgagcatggattgtttataatcaatcacggtgccgttcatgatgtcaaggctttctttgtcaactagaacagtgatgccgtgctgatcaaacacactgtctgattcactcttttcatgctcaaagcccatgccgtaagaaagtccgctgcagccgccgcctttgacgcctacacgtagaaacgcgttttcttcttcatgctctttcatcatatcttttatatgcaaagctgctgcttctgtaattgttaccgggttgctcatcattgtgaacctccttttaaaaaccggttgctgtcttttattataaacatgatcgtcccaattctcaaacaaggtgttttacaagaaatagacaccctcacaaacggtttcagccggccctgtcatcattacatggccgttatctttccagtttatcaccaaatccccgcctgctaaatgcaccgtgatgtcttgatttcgctttgatacgccgtttaatacagatgcgactgccgctgcacatgctcctgtcccgcatgcctgagtaatccctgatccccgttcccagacgcggaaatgcaattcttgttcattcacggtttcaacgaattccacattgatgccttccggaaatctcggatctttctcaatcaccggccccagtgtcgttaagggtgcctgttcaatgtctgcgatcggaaaaacgatatgcggatttcccattgaaacggcagtgcctgttagttctacttcaccaaatgccatcgtttcattgattgtgtgctcttccccgccgtcaagcatcgggagctcggattttgtcaagcgcggttcgcccatatcgacagtgaccacattcacttttccgttttcgacttgaacctccgctttcacaagcccggagagagtttcaatcagaaaagatgtttcctcaaccagcttatgctcatatgcgtattttgcgacgcagcgcaggccgttgccgcagtttttcccttcagatccgtcattattaaaaatccgcattttaacaggcgcttggtctgatgggcatatcaggatcattccgtcggatccgatccctgtataaacagaagaaacctgaattgcaatctctgacagtttttcttctggaagctgttcttcaaattgattcacataaatataactgtttcccaggccgtgcattttggtaaatcgaaatgagttcataggtgcctccaactttttttctttttcttagtataaaagctattataagcggacacaatacaattatcccccgtttttcatacataaaagctccttgcactgacgcaaggagcttttatcgtttatataaacatgccggcaatggctgcgctgagcagattggctaatgttcctgcaagaacagccttcaggccgagacgcgcgatatctgaacggcggctgggtgctaatccgcccagcgtaccaagcataatcgcaattgatgaaaaattggcgaatccgcataacgcgaaactgataatggtagcagttttcttagaaaactcgccgatgtgcggaccgaagttagaataagcgacaaactcattcagcaccaatttctggccgatatagcttcccgcctgcaatgcttcatgccaaggcacgccaatcaaaaaggcgataggagaaaacacataaccgagaatggattctaatgttacgccttttaaaccgaacaagccgaaagccccgccgagaataccgtttactacagcgattaacgcaacaaacgcaagcagcatcgccccaacgtttaacgcaatttgcagtcctgttgacgctccctttgcagctgcgtcaatgacattggctgcgccttcgccttcatccattttgaaatcgctttttacggtttgcgttttttccgtttcgggtataatcaatttaccaaagactagtccagctggagcagccataaagctggccgccagcaaatattcaatcggaataccaagaagcgcgtacccaaacaaggtagatcccgcaactgccgatagaccgctcgtcataatcgtaaacaactcagagcgcgtcagcccggcaatcaggggtttgatcactaacggagattctgattgtcctacaaaaatattggcagcagccgccagagattccgttttgcttgttccaaggagcttcgacaatccgccgccaatgacacggaaaacgagctgcatgattttcaaatgatataaaactgcaatcagtgctgagaagaaaatgataacgggcagtacacttaatgcaaaggccggactgtctccgacctttagaagcggtccaaaaataaaactgatgccttcattcgcatagtcaatcagaagctgtacacggcttgaaaaccataaaaaaacagcgcgtcccgcttcccatttcaacacgatgtatccaaacgccacctgtgtgcataaaccaacgatgacggttcttatcttaatattgcttttcttttctgaaaataaaaacgcgatagcaatgatcgcaactgcgcccagcagcccccacagaacattcatgaatactcgtacacctcttaaattttatttaaaaaaatatcttttatacgataacaataatattttttgatgtctacacatttttttagttcttttgtacagcaaaataaaaaagggcctgtccaggcccttttctttaaaacattggattttcttcaataaaggtatatatattctcaacaagctcagcaggcgtttcacccatgacgacttctccgtttaccagagcgaaaagcgattccatgcatgtcccgcagtagcttaagcagccatattcaaggacatcaaggttgggatccttctccaaaatcgcccgggcttcctgagagccgtgagccagattgctgacacaaaattcaatcattggattcatgcggtttcacctcacatatgtccattatcgcgaatttttcactattcgtcaaagacaacggatgattcaaaatttattatcgtaacatattatttctcaaataacgttttactaatttgtgttttcaggctaaattgtaggttattttgaaactattattgtgattttagatcaaattcgatataattctagatgttattttacatagttcgtattttcttcaatgtatctatcatactcttcggattaaaggggaattcaaatgaaaaaattggtcttgatcggcggaggttacgggaacatgcgtgttcttcatcgcttattgccaaaccagctgcctgatgatgtttcaatcacgttaattgacagaaatccttatcactgcttgaaaacagaatattatgcccttgccgcaggcacaatttctgaccatcatatcagagtgtcattcccagagcaccctcgcctggatgtccaatacggtgatatcacatcaattgatattgtacaaaaacaagtgctgttccaagatcgtgaaccgatttcttacgatgacgccgtaatcgggctcggctgtgaggataaatatcacaacgtgccgggagcgcctgaattcacctacagtattcaaaccatcgatcagtcccgcgaaacctaccaaaagctgaataatctgagcgctaatgccaccgtcgccattgtcggagcgggcttaagcggcgttgagcttgcaagtgaattgagagaaagccgtgatgacctgaacattattttgttcgaccgcggtaatctcattttatcaagctttcccgagcgtttaagcaaatatgtgcaaaaatggttcgaagagcacggtgtccgcattattaacagggcaaatatcacaaaagtagaagaaggcgttgtgtataaccacgatgatccgatttctgcagacgccatcgtgtggacagccggcatccagccaaacaaagtcgtcagagacttagatgtggagaaggacgcacaagggcgtattgtattaacgcctcatcacaatcttccaggtgatgaacatctgtacgttgtcggcgattgcgccagccttcctcatgcaccgagcgcccagctggcagaggctcaagcagagcagattgtccaaatcttgcaaaaacgctggaatggagaagccctgcctgaatcaatgccgcagtttaagctgaaaggcgtcctcggttcactcggaaaaaaagccggcttcgggcttgttgctgaccgtccgctgatcggccgtgttccgcgtatgctgaaatccggcttgctgtggatgtataaacaccataacggttaatgatagagaagaaccgctgatcaagtcagcggttttctgtatacccatgcttctccatttcctcataaacgtcttttaattttggattgccttcaccgacaattttgtcttctacgagcacaagcggataaaaatactcgtcatttctgattttttccgcaagctctttcgcatgttcattgtcaggcggctcatgaatatcgatgtactgcatctcaaaaggctgatttggatattttcttttcagcgcagcctcaagccactcgtatgtatccttggctgtcggcatattgacacagctcgcacaaacggtttctgccccgtacacgcttagaatgactggtttcatcacttgtagacgcccccttctcctatgtaagtcctttcttttaagtatacagagccaaagggcgtttttatagaaaaaaaccgtttttgtgttgaagtctgaatgtgctataatagggagagcaactttgcaaaccaaacaatagatttttattgttacactgaatataatggttttatgacgacgaaaggagcgaatgtcatgactgaagttgaaatgaaagaacaggtgcaggaagtactggacaaacttcgtccgtttttacttcgtgacggcggtgactgtgagcttgtagacgtagatgaaggtatcgttaagcttcgtcttctaggcgcatgcggcagctgcccaagttcaacaattacgctgaaagccggaattgagcgcgctcttctagaagaagtgccgggtgtcgttgaagtagaacaagtcttttaataaagcagccaggctgatatttgatcagcctggctttttttattagagatattggtcaaaccatgagctgatataattcaggcgcttgatccgctgtcttgggtgtccggtgcgtgacaaattgtgcgatgcattcggaaaacggacaagcttggtttccttgcccatttttttcagagcgataaacagctgctccgcctgctcgatcggacatcggtcatcccgctcgccatgcagtatcaaaagcggtgtctccacgtttgctgcgtattttaaaggagaccggtcccagagcttttctgtgtcctcaaacatgtcatgctcaagctgccagtctgtaaagaaatagccgatatcactgacgccgtgaaagctgatccaatttgatatcgagcgctgggtaacggcagctttaaagcggttcgtctgcccgacgatccagttggtcataaaacctccgtagcttccgcccgtgacaccgagccgcttaggatcaatatgcggatctcgtttgatagcctcatccacagcctgcatcacatcgtcataatcctttcccccataatctcctctgaccgcattcacaaattcctgcccgtagccgtggcttcctctcggattgatataaacgaccgcgtatcctttcgccgccagcacctgaaactcatgaaaatatgtatgtccgtacatcatatgcggaccgccgtgtatgttaagaataagtggatatgttgtctcaccttccatttgtgcaggcctcatcagccagccgttcaccatcacgccgtcttctgtagcatattgaatctcttcaggtattgatatcgtatgctccctgacaaacttgtcattcgcgccagtcagctgtttctcttcctgtccaagcgggatactgtaaagctcactcggtctgtccggctttgtcacactggcaataaagtgctgttcatcaggtgaaagagaaaagctattgatgtactctttttccagacgaatcggatacacaaggccttcaatcgaaatataatagatgcccgtactgccttgatctgtgccgatgacataaaacccttggctgtcctttgtccaaatcgggcgctgttcagcaccaccgatcaatgaatctccaatcagcgcatccgctaaatgaacgtccagcatctcagtaagacatgtgaggcggccttgttcgatatcatagagccacgcctttgagagcgtagcattcttatattccttttcatttccaagcaaagcaagataccttccgtctggtgaaaatgagcttgatccgaatgagccgcgatgaggtgtaacctgcttaagatctccagactccagtgacattatgtaaacatcatgcggcttgctggcatcatctgtttcagttaaattagctgagaaaacaagccatttgccgtcaggagaaaaagcaggatcaccatgatcagctttgtgacttgtcagctcttccatctcacccgactttacgctgacaagcacaagctgggcatacgcacctctcgtcagccctttgccgtcccgtttgtaggagaggccttgcacttcaacaggttcatagctgtcctgctctgttttttctcggtcatcaatgttttctccctctcccaaactgacagtgaccagaatcgattcgccatccggggaccatattggctttgacacgccatacgggatatcagtcagttttctcgcttctccgccttcagcgctcatcatatacagctgtgccgcatcgccttctcgatcagaaataaaggcaagcgtgcacccgtccggagaccatcttgggtcggtgcttcgcttttctccatgtgtccaaggaacagacccgcccgttttcgtttcatagatccatatatttgatgtatacgaatctttctcttgattcacttgtgattttacatatgcggcacgggtgccgtctggggcgtattgaggatcggtcacagagacaatcgctgtgatgtcgtctgcggttatcagctttttcatattcatctcctcctttttacatgtatttcgtttttctaaataaaaactcctttatctccagcaaaaaaagcgccctctgctgacgctgaggaacgcttggcatgatctatacactttttacttgatataaaggatttcgctctattatacttccctctttcgggacggtcaaagcgtctacttcacaatgagggaaatgaagcgcgagctgttcttttagctcttctccctttcctttttcggtcatgacgagaatcgtcgggcctgctccgctgagagccgttccatatgcgcccttcatctcggcgacgtgctctacttttgacagctcaggcacaagcatcgcccggtacggctgatggaacatatccttcttcatgattttcccgacaagcggccaatccttggacatgatcgcagcaatgagtatattgctgacagcacttgcttttacggcgtcggcatatggaaactccttcggaagcacgtctctcgcgtctcttgtcagcacttcgtaaaaaggaatgacaacgactacgtcaatgtcagcattcgggacgcggatcatttgggtctcgtcatcctcatgcaggccgatcacaagtccgccgacgagagaagcgccagcattgtccgggtgtccttcttctagactggctaaatgcagcttgtccgcttcagacagctttaagccgcataattcatcagccagttcaatggccgctacaatcgccgcggcgctgctgccaaggccgcgtgcaagcgggatgtcgctccacaccttcacatggacaggaggtatttcttttccgtacaaatctgcggtccgtttagccacttgatagatcaggttatctgtacccgccggaattccggcgactgtttctgtttcagcctcaaaagaccatttgtcgctttcaaagacggtcagcttcaaatatctgctgagcgccattccgactgaatcaaagccggggcctaggttagctgtgcttccgggaacagtgacagagaacagcatgtcggcttcgttcatacacgggccgctccttttacatattcaaggatgctgtcttcatcagtcggcaatgtgacaggcttgatttctgaaatgtcgaccgctgtgttcggatctttcagtccgtttcctgttaacacagctacgaccttgctgcctttcggaatttctccggatttcacctgtttcagcactcctgcgatagacgcgcaagaacccggttctgcaaacacgccttctacacgggcgatcagctgatatgcgtgaaggatttcatcatcagtgacttcgtcaattttcccattggattcctcggctgcctttacagctttgtcccagcttgccgggtttccgatacgaatggctgtcgctattgtttcaggattttcaatcacttcattgcgcacgattgccgccgcaccctcagcttcaaagccacgcattttcggaaggcctgtgccgtttttctcatgatattccttgaagcccttccagtacgcagtgatgtttcccgcgtttccgaccgggatcgctaaaacatcaggcgcttcccccagctgttcgcacacttcgaaggcagcagttttttggccttcaatgcggtaagggttgactgagttgacaagggcaatcggtgatttctcacagatggaacggacaattttaagcgcatcgtcaaagtttccgtcaattgcgataatctcggctccgtacatgacagcttgagcgagttttccaaatgcaatttttccgttcgggatgatgacaatgcatttcatgttagcacgggctgcatatgctgccgcagcagcggaagtgttacctgttgacgcgcacataatcgtgtcattgccttcttcttttgcctttgccacagccataaccattccgcgatctttaaatgatcccgtaggattgacgccttccgttttgacatgaagctcaattccgagctgctcagacagcttcggcaggtgaataagaggtgtgtttccttcatgtaaagttagcgccggtgtttgatctgttacaggtaaaaattctttatattgatggataagtcctttccacattagctccaaccgttcccttctacacgatatgtgcttttgacttcttgaacgacttccaaatcatttaggttttgcaggatatcactgaaatcagcttctgatgtatgatgtgtgacaattacgatttcagctaactcatcatggcctttaattggcagctgaaggattttttcaaagctcacgccccgctctgagaacacagatgtaattttcgagaatgaaccaacctcatcttttacatgaattcttaaaaactgctgtgcataaatgtcagacggcgatttcatgtttttctcatattgcggtccgacaaagctgttgccggttacacctaggcgcatatttttcatgacagcgacgaggtcagaaacaacggatgtcgctgtcggcatgcttccggctcccggcccgtagaacatcgtctcaccgacagcctcgccgtatacataaacagcgttaaactcattatgaacagcagaaagcggatggtggtcaggaagcagtgtcggctgtacgctgacctcgattttgctgccgtcacgctgagcaatcccgatcagcttcattgtatagccgaggcgtttgctgaagctgatgtcctcgtctgtaatttgggagatcccctttactttgacgtcttccagatccacgttcatcgagaagccgaggcgcgccaatatcgccattttccgtgcggcgtcaagcccttccacgtcagaagtcggatcagcttcggcaaaaccgagatcctgcgcttccttgagcacttcctcatatgggcttttctctttgatcatttttgttaagataaagtttgttgtgccgttcacaattcccatcatttttgtaattcgatctgatgagaggccttcctctaatgtgcgcagaatcggaatcccgccggcaacactggcttcaaagtagatatcgcatccattttccttcgcttcagcaagcagctcggagccgtacacagccattaagtccttgtttgctgtgacaacatgctttttcgatctcagcgcgtcgaccaaatattgttttgtctgttcaacgccgccgatcacctcgatgacgacatcaacatctggatcatcaatgacatcatacacttctgtcgtgagcacttccttcggcaaatctacttctctctttttctctatatcttttacaagcactttttttatcgtaaccggacagccgacctgatgcataagcttatcctgatggtcttgaataattttaacgacaccgcttccgacggtacctaaacctaaaagccctacacgaatcgctttcaaaaaaactccacctttcttttgattgtcctcttgaaaaagacaattgttaactcaacacagacatataagttacaaacattatataagcccgctcctgttttgacaagacagcattaggctgaattttgcgaatgtaaacgcttaacgcattgatatgacaagattctttattttctaattatttttgtcagattttctcctcaccctgagctgcctttgccgagccagctgacgcgtggaacaaacagcttctgcgcccgcatattcatgaattcctgcgctgtattgagaaattgttcataacgcccacagtcattaagaatgaagacaagctgttcttcaaaataatgcttttctgattctgatgacatgtaatagctttctacgatttcaaaataatgaagcgggaaaagcagacggctgtataaaaggcgtttcgaaaatgaagacagcggtgtgacttgctcgtattcctgtaaaaagagaaagccctgctgattaaaatcttgtctgtgatgcaaaaacgtatgcctcatatattcagccaaatcacgggaagcgtggtcaaacacccaatccgccggaatcctgatcaatgattccggtgaccatgtatgcctttccatccgctgatggcatatcgttcctgaatcagcggcttggggcttgtcatccagctcagtgtccactaaatattgtatcgcgttttctgacagtcctaaataatagggaaatgattcgatcatttttttatcgaatggctcatgcggaggggtctgaacctttctctgccaaaatgcttccagctgatcaattcgttttccccacagatccttccactggccgattcttccggccgccttcacctcatatggatatcctcggccttttcggtgaaattccgcaagctccgctccaatggagaacgccctgtttgaataagggggggccgccttcagcagagcgtacgtttttccctcatgttcaaatgtcagttcaccttcttttgtaaagataaaaaccgaaacgtatgggtcactttgttcttgtaaatactgactcatgtaataaagctccgccagctctgtttctgagaattgggaaacggggacaatcagaaagtatgaattaggcgtctgaaagcattgatatgtgtgctggtacatggaaagctgcctgatgtgaatgccgtatttttcttttattgtacctttcaccatgatcacctgcctgttgaattagggctcatcacatcgtagtcatacacagccggaattatgaatacatattttaatccgaagaaggcgcaagaaaaagtcgtaaacttctcaagcattttgtataaactagtaaaaaagattgggtgaagctgatgtcagaaaacgaacaattcagtcagatggaagctaaagcaagagcacggatgaaggagcgcggcgttgaggtatcagacattgccgagcttgtcttttttctgcagaaaaaatatcatccggatttaaccattgatgaatgcacgctgaacgtcaatcgtgttctcgcaaaacgcgaggtgcaaaacgcgattttaacgggcattgaattggatgttcttgctgagcagaaaaaactgtctgaaccgctgcaaacgatgctggaaatagatgaaagcctatatggagtagatgaagttctggcattttccattgtgaacatttacggatcgatcgggtttacgaactacggttacatcgacaaagaaaaacccggaatccttaaacgattgaatgataaatcaaccggtgaatgccatacctttttagatgacatcgtcggagcgatttccgccgcggcttcaagcagacttgctcaccgcgcgcggcatacagaataagggcacccttttagggcgccctttattcaaatgtatggaatccattcagtcagagagtcaatggcgtgagtcggtttttccatatcgtctgtcatatgttctcttttcgttacgcctgtgtgaacgagcagcgtatccatacccgcgttaatgccggccataatatcagtggcatagttgtcgccgaccatgagtgtttcagacacatctgtgccgagaacgcgcatcgcctgctccataataattgattccggcttgccgataaatacaggctgtacacctgtagatacggttaacaccgatgtcagtgagccgtttcccggcagaaggcctctttcagtcggaatcgcaatatctccgttagtggaaataaagcgggcgccatttctgattgccaggcagccgacagcaaatttttcgtatgtaatggaacggtcgatgccaacaacgacaaagtccgcgttttctccgccaaatgtcaggccgttttcttcaatcgcctggcggattccttcctccccaatcacatacacagacgcgtcttttttctgctgtgcaatgtgctgggcagttgccatgctggtcgtgaagacctgctcttctgttgccggaatatcaaaagacacgagcttgtccgctacctgcttcggtgtgcgcgaagagttgtttgtcacgaaaagataaggaacgccgcgatctttcagcgttctgacaaattcacacgcctcctcgattttttccgtgccattgtacattgttccgtctaaatcaattaaataccctttatatgttttcatatccaacactcctgtggctttccagttgttatttaaacgcggaaacaggtcctagctctgtttccaaatagcttctgatccgtttcgggaagtcctgaagagctgtttgatgcgccttgatcagcctgtaaagctcgccgctgtcagcgagcagatactgttgaaccaacgttttgcggtaggcgatcaattttttgagctcatcaccctctttttccgtgacaactttctcatcaacaagtatatccataatgtcgtcatagctgcccgggtcccgcataataaagccgtcaatcatgtcattgcctgtatccaaaatgcattcgattaacagatggcctatacgctgaagtgccaattccccgatttcagactgccagtctgtttgtgagtcaaatagcgccagctggtgctcgaagaaccctagtgttttctcgattttgcttctgtcaacaaaatacatgacagcatcccctttgtgtatatttattttctgatccgtttcaagacaaaatacgcacagccgaaattgcagtattcgtaaatatattcatctaatgtgctgattttcgtttcgaaggttgccttttgattctggtcgtcaaagaagcccttgagccttaactgaccgtatccccagtctcccacaatataatcgtatttatttaatatatcggagtagcgggctttaaaagcctcttcgttgaagccgtctttgaaattgtgcaccaattcaaattcggcattttgaataagaatcatgatctcacctctttttcactcattcctatcataattcattgccccgtccccatcaattgctaaagaataaatcatgcgatttggctaccctacacatgaggagggattgataaatgaaacgaaccgctgtcagcctctgcctgctaaccggactattatccgggtgcggaggcgcaggattggataatgcccaaaatgtccggaatcagacgcagaatcaaaccaaacccgttcatgtgtcggaccgcaacgaggcttttaacaggcataatgagaacgaacaatttggctatgtccgctatcaaaaagaacaatttgacggagaccagcagaaaacgccggtgatgaaccgggaagaaaccgctcacatgatatcaagtttaacggttcagcttccccatattcaagatgctgcgacattggtgaatgaccgagaagcgcttgtcgtatacaaaaccgattctaaaaaccgggagctgaccgccgatcaggtgaaaaaaacagcggcttccgtgataccgcgatactatcacgtgtatatttccgataatccaaaccatatgcagtccgtcgaaaattacagcaatctcggctctggttcaagggatattagagagatcatgtcggggacgattcaagaaatgaaaacctccccgcaaggaagccctgtctcagagaatgaaaatgccaatggagaaacgcgtcaggacatgaaaatcgataggaatgacaaaaacgccagatgatctggcgttttggcattatgcttgggcttgacgctttttagatgcttcgtttacttgttcatccgcatggtaagaggaacggacaagcggaccggcttcacaatggctgaagcctttttgcatcgcgatttcttttaattctgcaaattcatcaggatggtagtatttttggactttcaagtgtttcttcgtcggctgcagatattggccgattgccataatatccacgttgttcgccaagaggtcgtccattacttcaataatctcttcttttgtttcgccgagcccgatcatgatacttgattttgtcggaatgtcaggctgcatttccttcgcacggcgcaaaaattccaatgaacggtcgtacgtcgcacgcgcacggactcttggcgtcaggcggcgaaccgtttcgatattgtgattcaggatgtctgggcgtgtatccattaaggtttttaggttatcgtagtttccgcccatatcagacggcagcacctcaattgttgtgaacgggctttttctgcggatcgcacggacagtttccgcgaaaatgcctgcccctccatctttctgatcgtcacgcgcaacagccgtaataaccgcgtgcttcagattcataagcgcgactgaatccgctacgcgttccggctcttgcagatcaagctcagttggaaggcctgttttgacagcacagaaacggcatgctcttgtacaaacagaacctaaaatcataaatgtcgctgtacgtctgaccgcccagcattcatgaatattcggacactttgcttcttcgcatacggtatgcaggttgttttcccgcatgagttttttgagccctgtatagttttcatttgtatttaatttaattttaagccattcgggctttctgaggtgttcgtctttctttgccaattcccatcatctccaatatccaatatactcaatttctgacacgaaacattctgaaaacgagaaaggtgcagattttagttctgcaacaaaaataatgtttttctaactaaagaaagtcttttctttagacactttaacataggaaaaatttctcgacaagggaagatgattactgacatttttaagccgggttgccgcaaactatgtgtattcaatatgaaaggagattattttgtgaaagttttgttatccgctcttcttctccttttgtttgcatttgagccttctgcgtctggaaaaaagctttcagatccagtgctgtcgaaacggatggaattatatcataaaatcgaagctgtgacgcagatcccttggtatgcgctcgcggctgttgatcaatacgaagaaaacgtgcggagcaaccggaaagatctgcctgaaaaggcgggaatcatcagcatctatatacccgatgatatctggagcgggcctgaaaacccgaatccgaaagatgatgcgccgttaagcattaaagtgtttgacggaatcggaatggatggcgatggagacgggaaagccgaggtcagcaacgatgaagatattttgtatacgttcagccaatacctactgtcgtatggcacagatgaagacaacatccggatcgggctttggaattattaccggcgtgatcagacagtggggattatatctgaattcatgaagctgtttaaagcctacggccatattgatctgggcgagcatgcattcccgcttccgatcagaaccgattacagctaccgaagcacgtggggagatgcccgcggcttcggtggaaggcggattcatgaaggtacggatatctttgcccattacggccttcctgtcaaatccacatgttacggcgtagttgaaatgaagggctggaaccgcttcggaggatggagaatcggcatcagggacattaacaatacgtatcattattttgcccatctcaatgggtttgccaaagggattaaaacaggacaaatcgttgagcctggccaagtgatcggatcagtcggcagctccggatacggcccgccgggaaccgccgggaagttcccgccgcatttgcactatggcatgtacaaagataacggaagaaccgaatggtcatttgatccatacccgcatttgagggcgtgggagcgatatgaataccaaaaaaagaagtaacaaaaagccgcctcttcaacaggcggcttatttgctgcttttttctttttttgaatcggcaccgtcttctttgctgctcggaagctggacagaaggcgtgacacccgagccgccgcttccattataaaactgcggcacttcgccctgcactgctttaatcgatacaggaacattatttgtgacgacagcggttttgctggcaaatggaatgatgaccttcactttaatttcgacaaagatgctgatatcaataagtgcgttatttatgccatacggcttgattttggttttgacatctgtaaaagcgtcaccgattaaattgaaccggaccgggattttcggcccgaggtttccaagaaggctgttgccggttacctgtcccagcggaatgttgatcataatgttttcactggcgccgctgtgtccggtatgggtttccatctctttcaaatgagcctgaagctgctttgtcacttttgttttcacactgtttacaacctgtgtattaaaatcgattgtcgttaagtttccgttttcatcagaattcatttgaaacatatctttcatattttcactgtcagacatatagtcctcaatcgaatcctggatcacctctgtcgctatacgcttcgtttccatctcgccgatgtccattaaaacaggtttgatcgagccattgatcatccaaaggctgaccgttgttgacaggataaaaaagacaacggacaggagcatcacgtaacggaaaggcaaaggtcctctcttgcgaaaagggccgcgatatcttggcaagaaaatccccccttacatatcacaatgtatgcttgtaagaggggacatagtaatagccggggccaatttattttatttcatcatttttaaaagcgcttctctgccgctcatgccgactttgatgccaagatcttccgcagcgtacgtgacggattctaaaggtgcgtctaacagctggtcaatggtgcggacaccaactgcgcgtcccgccacgatgccgcgctcctttaatttttcattcagcagcgccacatcaagcgcgccgcacataatgtatccgtgatcattggcgacggccataaaattcgttttgggaagctttactgtcacagctgtaaaaggctgtccttctatcatgatcggtgtcaggtttaccacgtcaaccactcccttcattcatcactttatgatgaagggcacagcttgttgtgggctgactgccttattgtgcaagcttccaagcaagcagatcccgcaaaaattccggcataaaatattctttttctgcagcgtcgcgaatcaacggaaacagtttgccgagcgtaaacatatcaagcaccgcaacggagtattgtttatgtttttcaatatcttccccgttcagtgtgatccgagtgacgtgggtgatcccgtcatcgagccgtttcgtttctacctcaacgccggcatacaccattttccccatcacttctccgcggaagccgagtcctttgatccggagctgctccatttgttcggaagcggcatggacaatggtttccttcagttcttctcccgtcaggcggacagccaccgggttgatcggatgcggacagatgcggtgcagatccagctttgtcacaggacctgcttttagcggaccgagaatgacacctgaattgaccatactaatgtccgtctcgcaccattcctttaaggcgtatgctaaaagcaaaggcagctctgattcttcaaaccacttcacctcagcatcttgtgcaagctctgcaacggcatcggacagtttctcctcggcttcacgttctttttcattgagaaacgcttttgtttctgcggattctcctgtccattccgccatgttctgcacagaagccgttttgctaatgatgcttcgctgtacgctgtccaccgtgatttctacacagccgacataatggccgtatttctcggcgctggccagcagtaccccattaaccacttgtccatcttcaagcaaatgatgggtatgtgattcgaggattacatcaatctcaggcaccgcttcagccactgcttgatcatcaagaatgcctaaatgtgacagcagaacgataatatcagcctgccctttcacttccagaatggtttcctttatgctttcaagggcatccgtaactgtccatcccagcttgtcatatacaggataatacggcacagttacacctaagaaagcaatggacataccgtttttcaatgatttgatatggtaaggcaccgcccaggacggacggtttccatttttatcaaacaggttagagacgatgacaggaaattcagcatgatcatataagacagcaagctcttcatgcggaagcgtaatcccttcgttattgccgatcgccgctccatcaatgtgaaggcggtttaagagatcgacattcgcttttccgaatgtcgcctctgtcacgaattgaaaacgatcaagatgatcgccaatatcaaaaacgagcgtctcttcgccgtctgactgatgctcttttcttttctgctcgatataatctacaattttcggccagttttcaaaatggctgtgcaaatcatttgtatgatataagcggagcttctccttcataatatctctccctaatcgttcagctgaaaatgccttcataaatgagctggcagccgatcaaaatcaatacgatccgcatgatcataacgatcgttttcgtctgcatttttctgttgatggcggcgccaagctttccgccgaaccaagcgccgggcacaagcgcgagggcgtacagccaattgacgtgcccggaaatcatatgtgaaacagaccctgtcatagaagacaggaaaataataaacatggacgttgccaccgcaaccttcggcggaaacagaaataacagcatcatcgccggaaccatcagtgatccgccgcctataccgaaaagtccgcctaaaaaaccgacaacaaaggcaatggcaataccgacagaggcctgatatgagtacgtataaggctcaccggcatcatcctgaaatgtccggataattcctttgtgcgctttgttgattggccgggctttcgctttcagcattaaggataatgaaatcagaatcataaaaatgccaaaccaaacggaaaacgagtttgaattgaacagctttgacacgtaagccccgatcatgctgccgggacccgaaccgataaagaaaatgagcccgctcttataatcaactgttttatatttaatataagccaaagttgaagaaaggcccgtaaaaataatgaccaaaagcgaagttccaatcgcaacctgcggcgtcacatcctgaaacagctgcgtcactgtgcttaaaaacatcagagatggcacaatgacaattccgccgccaagcccgatcagacttcctaccgtacctgcgattaatcccaggacgaccaaaatcacaaacgacatcaatcaaaacctcttttctaaaataaatcgagctgtctcggagcaagtccgctgtactcgatatcaagcagttcaagcatctgcttgccattatccgcagcgtcaccgccggaattgttgttgaacaggacaaaaacatccttacattgctgctgcaatttattcaggtgctttttccaatcctccagctcctgttggttgtagcggtataagtacctgacctcccgccagtttttcccgccatcaggcttcatccagccctgcttgttgcgtccgtgaaacctgacgagcgttttgttttcatcggtcgcgcgcaacacggtcggaacgctgccttctccgatttgcggttcatcacagacactgtgaatccagccttccgctttcataaatgaaagcgtctgctcataaaatggcggcgagaaccaggaacggtttctgaattcaagcgcgcaaggaatatctcccatttggtgcttgcaccatctcaaataggcgacattctccttcttgcagtcaaaccacggcggaaattgaaacagcaccatggcgagcttattgctatgtaaatatggcgttaaagacaccttaaacgcatcaaacatctcctcttttgagtcaaagggaatttcgccgcgctgatgccctgtcatgccctgatatgctttcacgataaattggaaggtttcgggcgtttccttcacccacttttcattattgcgcgccggctgaatcgcgtaaaagctcgcgtctaattccacgatcggaaaatgggaggaataggcctgcaattttttctggctggccgttttcggcggatagatgctgtcatgatccccccaccccgtcagtccgatataaatcacactcattcacctctcttccagtttatcacacgtgttttcaggtttcctcggaaatgctgttcatatggcgggaaaatgcagaacgaagatgctgatattgttcctcattcgtatctaaaaacgcctcttctcttgaggaaggaatatgctgatattcaataggcgcctgaaactgctcactcgtaaaatcgtacatcacaccattgatgctgttgtaaaaatgccagctctcaccgacttttgttttgaaaatcgtgccgccgaaatggtcttgaatcaccaatgccgtcacgccgcattggccgcatgacgggcattcttccgtccatttagagctcgaatggcgcgaccaggattgcttaagtatgtatttgacatgctccattgcctccgcctcctttaaaaaaagataccacgttgatgagattttaaaaactagaacggaggaaatcaaaaaacccggcggtaaaatccgccgggcttacgaaggaacgaccagagctccgtcaatttcagtgaccttttccccatcattgtacacgcatcggcctttgctgtaagtggcccaaatgctgcagggaaatgtatgtccttcgtaaatgctttttttatgctttgcaaacatcgattctcttgtaacagtgtacggctccatgctgacgagcacgaaatctgcatcacaccccgcctcaagccgcccttttttctgaaggccgaatcgttttgcaggggccgccgctgtccattctgcgatggtttcaaacggaatctgatgctcaagcgccagttccagcattcctaataaagtgaactgcccgccgctgattccgccccatgataaaaacatgttatcctcccgcttcaaggatggacggcagggggaatggtctgaggaaaccatgtcaatgtccccggcaatgagcgtctcgatcagcgtctcttttgattgcagcgaccggagcggaggcgcgcattttgcgacagagcccctttgccgtaaatcgtcatggctgaacaagacataatgcgggcatgtttcaaccgaaacatcaagaccttcctgtttcgcctctctgatcagccggaccgctttcgccgtgctgatatggacaaaatgaaccggacaacctgtcaccttcgcatactgaatcgtgcgatacaccgcttcaacttctgcttcctccgggcgggaggcggcgtacgcatccgcgtccacctttcctttattggccaaaaccatctgcaagtagcttgtaatcgcgtcactttccgcgtggagagcgaggatttttcctgcagccgcgatttctgccatgcctttgagcaatgtccgttcatcaacagagcggaactcatcagtgcctgactttgataaaaacgctttaaacccgatcgctcccgcttcagccatcggacggatgtcctcgatatggcctggcacaaggccgccccatagcgcaaaatccacggcagatttttgcctgcctagctcagcttttgcgagaagatgctctgccgtcacggttgatggaatacagttgagcggcatatcaaaataggtggtgcaaccgcctgcggccatcatttgagaacctgtttcaaacccctcccaatcctccctgcccggttcattaaaatgaacatggcaatctatcacaccaggaaacacgtatttcccgtctgcctggatgatttccgtcccgcttgcttcaatgtcagaacctatctcggcaatgacaccgttttgaactgcaatatcagcttctataacgccatctggcgtaactgccttcgcaccttttatcaccatatcgtaagccatattgatccccccatgtaaggatgacgatttttcatgtcagtttatgtaacacaaccagttctattttcaacagtttactgctactatgatcgtattacatcagcaaaaccgctagaattcctattgaaaattattcaccttaaccaatgtttttatagaaaaggagaatgcgctatgaatatttttgatgtgatgaaaataccggcttttaaaaacgccaatttaatcgctggaaaagcaggaggggaaagagaggttcagcatgtcaatatgatggacgctccggatatcgcagactttttgcataagaatgaattgctcgtcaccaccgcctatcacctgaaggatcacccgcatcaattatctgaactgattcggcaaatggcaaaacgcggctgcgcgggcctcggcattaaaacaaagcgctatctggaagatatcccgaaggaaatcatcgaactggccgattcatatgcgtttccgatcattgagcttccggaacacatccgactcggcgatattgtgaatgccacactcagccatattctcgatatgcgttctaacgagctgcagcaagctatttacgcgcacaaaaaattcacaaaccacattatgagcggcaaggggctgcaatccctcctcaaaaaggtgtcagacctccttcagcttcccgtgctgctgcttgaccagcatgccaaaatgctgtctgcgtctcatcagatttcagttgagaccgaaaagctgaaaggcaccctgaataccgtatccgggccatttttcacttgtttctctacaatctcagatcagaaaacatattctgtcctgcctatttataatcacgaaaaaaactgcggctacctgctgataccggacatggtgcaggcaggcgacaaaggattgatcctcacgattgaacaagcggccaacgtcatttcctttgaactgctgaaggaaaatgcgctgaagcagttcagccggcgggcccgcaatgagtttttcaacaattttattgagcggaccttttcttcagatgacgaaatcaaaaaccgggcgaaagaattcaagctgcgctgggatcaaaaatacatgtgcatcgccggcaaactcgatcgcaatgacgaatcaatcagctttacagaaaatcagctcgcttccgacagcgtattcgaatttcttgaaggtgaattatcagccttcccgtttccgcctcacttctttatgaaaggaaacgtcggcattattctaatcgaagcgacagacagctggagtgaaatgcacgcctcggtgatcagctttttagaacagttccaaacacaggtcagcgctcaatttaaacgaaccgtgtcctttggcatcagcaatatctgccaaaagctcattgatgttcccgacgctttcacagaagcttctgatgctctgcaatcggggcatttgtcgagaagcaccgcatttatccaggtgtatcacgccaaagatgtgcctgagcttctgcgcttgctcccggttgaggatttgaagaaattttacaactccacgcttcagagcctcgctgaaaaacagcaggaggatcaaagcctgcttcatacgctttccgtctatttagagacacactgccaaatttcagagacggcaaagcgtctgtacgttcatcgcaatacggtcatataccgccttgaaaaatgcgaagagcttctgggtaaaagcttaaaagatcctgaaacaacgatgcgtttgcggcttgccttacgtatgcagcggctgatcagctaatgctcgttacattttcttacaaaacgaatcatttttcgtcactttcagcaatcacacctgtctttttcagctactgtatccaatgacacccctcgatcggcacgatatcatgttactaaagttcacatacagggagggactatagtgaaaaaaagatcgtttaaggtgtttacacttagcctgcagcatgtgctcgccatgtatgcaggtgcgattttggtgcccctgcttgtcggcagggcgctgaatgtaacaactgaacagctgtcctacctattggcgattgacctgttaacatgcggcgtcgctacgcttttgcaaaccttgcgcggaacatacatcggcatcgggcttcccgtcatgcttggcagttcatttgtggccgtcaccccaatgattgcaatcggcagcaattacggcattcacgcgatttatggttccatcattgcggccggtgtgttcatctttttgtttgcgcgttttttcggcaagctgactgtgttatttcctcctgtcgtaacaggtaccgttgtgaccttgatcggcctttcacttgttccgacaggtgtgaaaaatatggctggcggcgaaaaaataaacggcagcgccaaccccgaatacggttcgctcgaaaaccttcttctctctgtcagtgtccttgttctgatcttagtcctcaaccgctttctcaaaggatttgcccgaacactgtccgttctgatcggcatcgccgccggaacagcggcagcagcgatcatgggcaaagtcagcttttcttctgttacagaagcaccgttcttccaaatcccgaagcctttttacttcggagcccctgcgtttgaaatcggtccgatcttaacgatgctgatcgtcggaatcgtcattattgtggaatcaaccggcgttttttacgcaatcggaaagatatgcggcagacctttaactgaaaaagatctcgtcaaaggctatcgagcggaaggaatcgccattctcatcggcgggctgttcaatgcctttccttataatacctttgcgcaaaacgccggcttattgcagctgaccaaagtgaaaacaagaaacatcgtcgttaccgcaggctgtatccttgtctgtctcggactgattccgaagattgccgcccttgcatctgccgttcctgctgctgtacttggcggcgcgaccgtcgtcatgttcggcatggtgattgcctccggcgtcaaaatgctcagcacagcggatctcaaaaatcaataccacctcctgaccatcgcatgctcaatcgcactcggcatcggcgccagcacggcccccgggatttttgctgaattccccgctccgattagaattctggtcagtgacggcaccatcactggcagcctgaccgccatctttttgaatctatttttcagcttgcgcgacaaaaaagaattaacagcacagcaaacagaacttccagtattagaacatacactcgcattagaaaaagaggtgtaaaaaagatgaaggaacagcacaatgccttacagctaatgatgctggggcttcagcacatgcttgccatgtatgcgggagccattctcgttccgttgatcgtcggagcagcgatcgggctgaatgcggggcagctgacgtatttaatcgcgattgatttgtttatgtgcggggcggcaactcttttgcagctctggagaaaccgatatttcggcatcggccttcccgttgtgctcggatgcacgtttaccgcagtcggcccgatgatttccatcggaagcacttacggtgtcccatcgatatatggtgccattatcgccgcaggactgattgtcgtcttagccgcgggcttcttcgggaagcttgtccgtttttttccgcctgtcgtaaccggatcagtcgtcatgatcatcggcatcagcctgattccaacggcaatgaataacctggccggaggtgaaggaagcaaagaattcggctcactcgacaacgtgctactcgggtttggcgtcacagcttttatcttattgctgttttatttctttaaaggctttatccgctccatagcgattttactcggtcttatcgcaggaacagcggctgcatatttcatgggaaaggtcgatttttctgaggttttggaggcgtcttggcttcatgttccgtctctgttttatttcggaccgccaacctttgagctgccggctgttgtcacgatgcttctcgttgcgattgtcagcctcgttgaatcgacaggcgtttattttgcgcttgcggatatcacaaaccgcagactgtcggagaaggatctggaaaagggctaccgggcagaaggccttgcgattttgctgggcggcttatttaacgcgtttccctatacagctttctcgcagaatgtcggcatcgttcagctctcaaagatgaaaagtgtcaacgtcatcgccatcacaggaatcatactggtcgcgatcgggctggttccaaaagcagcggccctgacaacagtgatccccaccccagttctcggcggcgcaatgatcgtcatgttcggcatggtcatttcttacgggatcaaaatgctatccagcgttgaccttgattcgcaaggcaacttgctgattatcgcctcttccgtcagcttggggcttggcgctacaacagttcccgcgttgttttcatctcttccgggcgcggcctctgtcttggcaggaagcggaattgtgatcggcagtttgacggccattgcactgcacgctttttttcaaaccaaacagccgaatggcacagacataaaaacgtaaaggaagatgccaatgttcacaatggatgacctgaaccaaatggatacacaaacactgacagacacacttggctctatttttgaacactcttcatggattgcggagagatccgcagcactacggccgttttcgtccctttctgatcttcaccgcaaaatgactggcattgtaaaagctgcggatcgcgagacacagcttgatttaatcaaaaagcatccccggctcggaacaaagaaaacaatgagcgatgactcggtacgagagcagcagaacgcagggctcggcaaattagaacagcaggaatacgaggagtttctcatgctgaatgaacactattatgatcgcttcggctttccttttattttagcggtgaagggaaagacgaaacaggacattcaccaagccctgctggcaaggcttgagagcgaacgagaaacggagttccagcaggcccttatagaaatttaccgaatcgcccgctttcgtctggctgacatcatcactgaaaaaggagagacgcaaatgaaaagaaccatgtcttatggcaaaggaaatgtatttgcataccgaacgtttttaaaaccgctcactggagtgaagcaaatcccagaatcatcttttgccgggagaagcaattccgttgtcggcgttgatgtgacatgcgaaattggcggagaagccttcctgccatcatttacagacggagacaatactctcgtcgtggcaacggattcaatgaaaaactttatccagcgccatctcgcatcctatgaaggaacgacaaccgaggggttcctacactatgtagctcaccgatttttagatacctattctcatatggacaagatcactctgactggtgaagacattccgtttgaagcaatgcctgcatatgaggagaaagagctcagcacaagccacctcgtcttcagaagatcgcgtaatgaacgaagccgctctgtgctgaaagcagaacgaagcgggaataccataacgattacagagcaatacagcgaaatcatggatcttcagctcgtcaaggtgagcggcaactccttcgtcggcttcatccgggacgaatatacgactctcccggaagacggcaaccgcccgctgtttgtctatttaaacatcagctggcaatatgaaaatacaaatgactcatacgcttctgatccagcacgctacgttgcggctgaacaagtccgcgacttggcgagcaccgtttttcacgagctcgaaaccccttcaatccaaaacctaatctatcatatcggctgcagaatattagcgaggttcccgcagctcactgatgtcagcttccaatctcaaaatcacacgtgggatacggttgtcgaagaaatcccgggctcaaaaggaaaagtctacaccgaaccgcgcccgccatacggtttccaacattttaccgtgacaagagaagacgccgagaaagaaaaacagaaagccgctgaaaaatgtcggagcctgaaagcctgatgggaaaactgacaacccatattttagatttaaccagcggcaaaccagcggcgaacgtaaaaattgaattgaagcggctgggcgaaagtattttgaaagaggtttacactaacaatgacggcagagtcaatgtccctctgctggctggtgaagagctggtttccggagagtatgtgatggaatttcatgcaggagactattttgcgaataaaaacgtgaatacggtcgaccagccgtttttaaccatagtcaccgtccgttttcagctagcagatccagatgcacattatcatatcccgctcttgctgtcgccgtttggttatcaggtgtatagggggagttaagaaggaagcccgcctcaccggcgggcttctatttgcacttcaataaacttttgatcctaggacagtacttgaagtgatccccacacttagtgaaacaacagctagaataaacattcacctatatttttcaggataattgcctacgagaaaaatatcctgtagtcctttcatttataaatcgaggtttcaaactaataagtcagctcttagcagccgagctcccttctccaatcctataaacagaccgcgttttttctcgaaaaaatactctgaagacaattgctgcgtttttaatagttttgataacgcgttctctcttacacctttagacaaaatattcattttttcttttttagacttaaatctatgtcgaaaatgatcgttggcatatcttatactatctccactaaaggaggtgacattatgggattctacaattctggtggatacagtggaaactctggttactcaaacggtttcgggagctccttcgctttgatcgtggtgctattcattttgttgatcattgttggagcagctatctttaattattaagtttaactttccttgcctccgccgtatccaacacctccctgtccgacagacgccataagaagtttttatggcgtctttgctatgtgttcactaatctttttctaatcagctttcaagttctacgagatttatcgtgtgttttcccacaacgcttctgcgtcttgatcgcgctgtctgactgaggctaaaaaagtccggcttttaaaagccggactcccgtctacccccgttcaactctcttctaatcctgcaagctgaccgcataatcccgccgtacccggtacaccggcacaaattccccgccagcccttcttctatatcttcgtcagaaggttgaggggtttcccgaaacagtgctttaagcgcaattatcattcctggggtacagtagccgcattggaagcctccttcttccagaaaagcggtttggcagatatccagttcctcttgttgtacgccctcgattgttgtaatggaatggccgtccacttgataagccatggtcatacacgcattggccagctttccgtcgattaaaatagagcaggctccgcagcggccgattccgcaggacacctttgtcccggtcagctgaaattcctttctaagcaggtcactcagatgtgtcgtaggaacggcagcaacctcccactcctgcccattcacggtcatccggaactgttccttttttacaggaaatggcccggcctcttttacgtccattgcttcagcccctttctgtctatcgcttcaagcagctcttctcttgaaatcggcagcttgtttatccagcatccgaccgcatcatgtactgcctttacaatcgccggagtgatggcgattgttccgatttcgccaacaccgcgcggtccatatacgtctcccttcattaagtcttctattgcaatcaccttcatgtcaggaacatctttgattccgggaatcaaatagtgatcgagattttccgcagcataacggccatccgtcattttcgcttcctccatcagtgtgtagccgagtgccatggcagcgccgccttcaatttgacctcgatatccctgcggactgatgaccggacctgccgcaatagcgtgctcacaatctatcaatttgacatcgcctgttaacagatctacctccacctcaacggcagccgctccaaatgagtagaggaaatggccgcccaccacaggatcaggcgttgttggaaagtcaaatgccgtttcctctgccaaagggcctttttcagccagctccttatacgtcaccacgagcgcctttgtgtttttgtcacgcaagcctgcagcgccgggaataagattttccgctgaacagccgctccattctgccgcccgttttttcaactgagctagaaacggcttcttcaaacgctggatcgcgtgccacaccatgcttgtgccgcgggatgctgtggaggagcctgacttcggcacttttgcggtatccccaataacaatggaaatatcctctgcggcacaacctaactcctccatgacaatctgttcaatcgctgctagaatcccctgtccgcattcttcaaatccaaacgaagcagtgattttgccttcactcgaaagagacaaacggcctcctgccgcatccattcggccataccccagcccgccgccgtgcattgtaattgccgctcccgtgcctctttgcagatacccgcagttccggctgcttcttgtaagaatgggagatttagatatggcattcaacacctgtgccgctccgtcagtcggtgcaatccgatgctcaagaggccccaagtcatgcggttttctgatattttttcttctcagctccagcgggtcgatgccgagcatgccgctgagacgatcgagatgggtttcgagtgcaaatgtgatttggttgccgccaaagccccgaaattcccccgccaccccgttgttcgtaaatactgatattccttcagtccggatattcggaatacggtacggccccgcggcatgctcgacagaaaaatctagaacggcaggcccaagcgtggcgtaagcgcctgtgtccgccacaattttcacgtcgtgcgccaatagatttcccgaatgatctgcacccgtttttatcgtaatcttcatcggatggcgcttaatgccagaacgtacagattcctttcgtgtctgatggattttgacagggcgtccgcttttcagggccaaaagcgcagcatacggctgaatattcagctcatccttccctccgaacgagccgcccatcggacttgacacaattctgatcttctcttcaggaatatcaaaaatacgggcaagctggaaacggtctttatagccgtgctgggttcctgcatacatcgtaaaacccccgtcgtcttccggaacggctacgcctccctccgtttccatatacgtatgcatctgccgcggcagctcataggtttcttcaaggactgtgtcagatgcttgaaacccttcttccacatcgccgtttgaaaaaaatgcgcggtggaggatattcccgtcctcatgcagtctttgcgcattcggccgaagcgctttttctggtgaatccatgacttccagctctttatactcaactcgaatcagctccagcgccgcttccgcgatttcttctgtttccgcagcaactgcggcgatcgcatccccgacataccgcaccctgtcctcacataaaaccggctgatcagggatgacaatgccaaatcggtttaagccgggaacgtctttatgtgtgacgacggcctgcacgccttccattttctcagcttttatggtgcaaaccgacacaatctctgcatgaggataagcacttctcagcaccttgccatacagcattcccggaaagctgagatcggtcatatatttcaattcccctgtgaccttatcccttccatccggcctgactcttgacggtttgttgatgatcatttattcccctccctcagccatcagctctgccatgatgacgttggcagcggctttttttctgtatgccgctgacataaaagcatctgaggaaaacggcagctcatggataagtgttttgtacagctcatgcgagtcccaccctggtgccatccatttcgcttcgctgtccaataatctcctaggagtgatatcggcatggccagcggcgaggcgaatgccgccgtctttcaaaaaacgtccagctgcaacagcaaccgctcctgtaaaagcctgacgccttccaagcttgtgataaaatacacgctctccctccgcccgcgggatgatgacacgcgtgacgatagccgttctaaagtcttcctcaatgagccaagcgccaagcggcagcctgattagcttcttttgatatacgataagatcagcatcaagcacaagcagaagcggaatgaaatcaccgattttactcgctatgttgccgccaatcgtggcacggctgcggattcccggtgcggcgacagcggaagcagcgtcactgaaacagccaagcgtgctcttgatcaaagggttctttctgcattcactcagtgatgtgagcgccccgatcgacacgtgggtgtcactggcgctgatccctcgcatctcgtcaatcccttcaaggctgacaaggtgctgtttcggtagagttcctttgtcccactgaagctgaagcagcgtgcttcccgatgcggcacacacatccggagcaagcttctctaaaagcgaataggcctcatcaagcgctgccggcctccataattgaatattcatccttgcttttgtcacttggccgttcaagccatcgccctccttaccatgtcatattcctcgggtgtatcaatatcgtccaactcgccgctatcctttgcctccaaaaccgctcctgctccaagctgtccgcttttcaggagcctgcgagccccttcatctcccgttaacccctttacataaggaaaacaagccgacgagaagtagattggcggggtgaacgcccctaaaaacgatgacacggcaaatggctcaggggccagtgccacaagggcattgagatgatcgacggaaagctgaggctggtcggctaacaaaatgacaacgccgtccgcccccatgctttctgcttttctcaccccgctgctgactgaatgcccctgacccttttctgcgtcttggcaaacgtgcaggctccagcgtttttgaaaaggcggagcgtgatacggcgctcctatccactcaagggaggcatgttctgtccgctcgacgaccagcacgtgatcaaggcgggacgacagagcagttttcaaggaaagtgagccgatgttttctccttttagcggcaaagccagcttgttttgacccattcttctgcttttgccggcagcgagaaacacgccgatcagataggggcttctcatacaaccgctattcgttttcttgtttgaatgatttctgcaactacacttaccgcaatttcctctggaccttccgcaccgattttcagcccgaccggactgtaaaagtgagacggaggatgttttccgttcagcagccgtttcgtgcggtttgccgaacccaacagtccaatataatggaggttttgagaaaataagaagttgatgatcgtttgatcgtgctgataatgatgggttgccacaacagctgcatcatgcggaaaaaattgaaatttgctaagcattcgttccggaaaagcggtgatcagctgatccgcttttggaaaaagagaggatgtacaataagcgggccgccaatccgtcacgataacagaaaaccctgtgtcagccgccaaattggccagcggtacagtatccggtcccgccccaaacagaatgaggcgcggcttcggttcaattcgctgaataaacatgttagtgggtggatcgaaatgcggtaaatgaagcgttgaaacagtacgttgaatatcttgcagaggcgcgtccggccagttgccaaaatgcccgttctccgtcagaaataaataatgggaggattcaatctttataacagaagtgacagctttgcctgaatgaaggcaatccctcactttctcatagtgccgccttttttcctgagtgattcgctctgcatgaacatgaataatgccattgcacccggctcccatgccccaagaaagatcgtcctccgaccgcatgtcgtagggaatcagcgttgatgtgagctgatcgcccagcgcactgattctttggaatacatcttcttccacacacccgccgctcagcaagccaatccgtctgccttttttcttaaagagcatagaggcgcctgcttttcgatacgcggagccttcaacttgaacaattgtcgccagtacagcctcctcctggtcttccaggagcgcatctaacatcgtgtgaaaattccccaatgccgcatcctcctctcgaaaattgccgtgagaaacaactagttcagcgtgattttataggtaacttgtataaagaatagacgatggaagaaaaaatgactcatgatttgtcagaaaatgaaacacatagaaagaggatttgtaaaaagagtcaaacgaagaaaatcagattggagaaaacacgaaatcatatctaaaaagcttgcggagttccgcaagcttttctttacaccgctgcctggcggccagcgttttcatacacatccagcgctgcttggagcgcttttcctgcttcgattcctgcgttatgtctgagaagcacagcctctaacccggcaagcacgaatagcacgttttcttttctgcagctgtaccccatcgtgccgattctccagatcttccctgcgagcgggccgaatgagctggcgatttcaataccgaattgtgccagcagcatgccacggacagactcgccgtcaatgccgccgggaatttcgacacaggtgacaacaggcattttgcagctgtcatctccaaacaatcttagccccattgcctttatccctgctgctaatgcggcttcatggtgccgatgccgctcaaaacgcgcctcaaggccttcttcaagcaccagtctgactccctcacgtaaggcgtacagcatcgtcgtcgcttctgtatgatgattgagccgtctttcgctccaataatcctcaagctggctcaaatcaaagtagttgcttgtgattggccgatttcccgaaagcgcttccctgtcagcttgtgacgcaatcccccgctccacctttttacgagctgcaatcacgtccgccacccgctcattatatgtaatcggcgccattcctgagggcacagacaaacacttttgcgttccgccgatggcagcatcaatcttccattcatcgactttaacctcgcagcccccaatcgttgcgactgcatcgacgataaacaatgcatcctcggtgcggcaggcttcgccgatggctttcagcgggtgaatccgtcctgtcgatgtttctccatgcaccatggccacaattttcggcttcactttttttatctcccgtatgatgtcctccgggtcaaaaaccgttccccattcgcactcaagcatatgaacatttgccccatatcgctcggcgatttcagtcagcaaataaccgaaacggccgtaaatgggaatgagcacatcatcttccggctctatgacactagccagcactgcttcaattcccgcccgtgaagtgccgtcaatcgggtatgcccagcggttttttgtttggaacagctcccgaagcatctccatcgtttcattcataatacctgtaaacgccggatcaaattggccgacaaccggggtgctcattactcttaatacacgcggatcaacctcaacaggccccggcgtcataatcgttcttaacggggtgcataattctcttctgcctgacacagccattcctcctttatcagtaagccagtttgtataataaatcagtcagtgcgcggacgccgatctcaagctgtctggctgacgtatattccttcggtgagtggctgacgccgcctcggctcggcacaaacagcatacaagcaggatagcgccttccgatcatttgcgcgtcatgccctgctccgctcaccatttcctcacagctgaagtcgttttctaatgctgtttcaaaagccgcagccttcagcctttcgtccatcggcacaggctctatccgcatatattcatcaatcacagcgcgaattcctttttgtaggcaaatgccgttgatcaaagcaatcatgtcttgatgaaactgttccagcacatgctgatgctgatggcgaatatcgattgaaaactggacgcggcccggtatgacattggctacattgggctctgccgttatttttccgcatgtcagacggagctcatccggcagctcctccgaccgcagtaacagctcatgaatgatacggctgctggctgcgagcgggtccttgcgccatttcatggaggtggttcccgcatgattgcattcaccctccagcgtgacgagatagcgcctctgccccgcaatgcttttcacaatcccgagatcccgtcctgacatttccaatgtctgtccctgttcaatatggagctcaacaaaagcgctgatatctgtccgatatgctgcctgaaacacacctttgccaaaaccgttctcatgcatcgcatgttgcagcgagactcctgattcgtctcttggctctgctccatcctgtaatgaaaaaacacccgtcatattccctgatccccaataggtcattggaaaacggctgccctcctcctcacataaggataccgcttcgagtgtttttttcggcgctccatatgtctctttgagccgctttatcgcaagcattgctgccagaacaccataggcgccgtcgtattttcccccattgatgacagtatcgatatgtgaaccggttataatgacttcatccggagactgggtgcccgaaagccttccaaacaaattgccgacatcgtcgaatcttgtgtcaagcccgaaagaagacatttccgttttcacagcaagctgtgcgtccatccactcttttgtgtataaaagcctcgttacgccgccatccgcagacgcaccgtattgggcgagccattcaatataatctgtgatgctgttttttactgaaagcttctgcttttccatgtactcccccctctggccgctatggtgacttcattatagaaggaggaacatgatagttcattgacagattaaccaaaaaaacgtttattttttagtcacagtatctatccagcaaccagattcaccctacatgtcacaactattttgatgtaaaggtcaaaaggaaacacggtaaggaagagagccagcaagagcgaaagagagggtcaagctcagcttgccagagaggcgatgtttgcggaacggatgaaaacggaaatgccggcagctcgcaaaaacaggacctaaagatatgggaacaggagatttccgcctcctccaaagggactaatttacaattttaatgaaaaatatacaaaatgacacttctatcctttatttcaattttagataatagacatgatctgataaaaggagggcaagtgatgacaaaaaaatcatggtttctgccgctcgtctgtgtattactgatttccggatggcttgcgccggcagcttcagcaagcgcgcaaaccgaattaagcctcaatgaccgattggcgtcttcccctgcaggaacaggaagccttctctcattagccgcccccgctgcaccctatgctgacacagatacctattatgaaggggctgaaggtaaaacaggagactcgctaaaaagcaccctgcaccgtattattagcggacacacgatgctatcctacagcgaagtgtggaacgcgctgaaagaaacggatgaagatccgagaaatccgaataacgtcatcctgctctatacgaatgaatcgcggtccaaaaacctgaacggcggcaatgtcggcgattggaaccgcgagcatgtctgggcgaaatcccatggcgattttggtacgagcaagggacctggtactgatattcatcatttgcgcccggctgatgttcaagttaacagcgcaagaggaaatatggattttgacaatggcggcactgaatatgcgaaggcacccggaaattattatgacggcgattcatgggagccccgcgatgatgtgaaaggcgatgttgcccgcatgctgttttacatggctgtccgttacgagggtgatgacggctatcctgatcttgagcttaatgataagacaggcaacggctcagctccttatcatggcaaacaatctgtcctgctcgaatggaataagcaggatccggttgacgaccgcgagcggaaaagaaatgaaatcatttatgaaaaatatcagcacaaccgcaatccatttatcgaccaccctgaatgggcggatgagatttggccgtaagaaaaaggtgctccttttgaggagcacctttttctaatacacagcctcttccgtttccgcatcgaaaaagacgacgtggtccattttcactgagagctggattgaatcgcctgcatcgattcgcgtgtttccgtccaggcggaccttgagccgctcgtccccagccatgacatgtactatgagctccgagcccagattttcattcacttccacgttcgcttgaaacactgaatcaaacaactggtcatttcctgtcatttgtgtgatgtgctccggccgtacaccggcaatcatctgttctccggcatatcccttttccttcagccgctttgctttttcttcaggaatatgaagccggatcgaagaatttgtgaaaaacagctcgccatgctgctgttctatgatgcctttcaaaaagttcattccgggagagccaatgaagcctgcgacaaacaaattggccgggtaatgataaatgtcatgaggtttcgccacttgctgaatttccccttcattcatgacgacaatccgatctcccattgtcattgcttcggtctggtcatgcgtgacataaatgatcgttgcctctaatcgctggtgcagcttgctgatttctgtccgcatcgtcactcttagttttgcatccagattagaaagcggctcgtccattaaaaagaccttcggctccctcacaatcgacctgccaagcgccaccctttgccgctgcccgccggagagcgccttcggttttctcttcagcaaatgttcaatttctaaaattctggctgccgcatgaacccgctcggcaatttcctgtttcgccatctttctgagctttaatccaaacgccatattatcaaaaaccgtcatatgcggataaagcgcatagttttggaataccatcgcaatatcacgttctttcggcggaagatcattgacccgctccccatcaataagaagatttccttcagaaatgctttctaatccagccaccatccgcagcgttgttgattttccgcatcctgacggccccaccagcaccaaaagctccttatcctttacatctaaatcaaagtccttcacggttaattgtgagtgatatgattttttgacgtgttcaaatgttaatgaagccatcagaaaagtccccctatcttttgacccgttatttcgtcactggaaacaacttggtctttctgttatttttagagtaatcgattcccatttttgctatatttctaaaataaaaaatgtaaatttgtattataacgtcataatacattataatataaataataggttaaaaggaggctaccctttgttaaacaacggaagttctacacctttatacattcagctaaaacaaatcatcactgatgacatcaaaaagggcgtgtattccccaactgccaagctgcctaccgaaaacgagctttgcaccaagtataacgtcagccgcatcaccgtcaggaaagccattctcgatttagtcgaagaaggctatctgatcaggcagcagggaaagggaacgttcgttaaaagccctaaattaaaacgagagctgatcgctgtaaacggctactcggaatttatggaatcaaccggcaaaaaaccgaagcatcatgtgctgtcccatgacatcattccagcgtcaaaacccatcgccgaaaagcttcaaatccaacccgagagccctgtggttgaattaaaacggattttatataatgatgatcagcctctcacctttgaagtgacgcattatccgcttgatttgtttcccggcattgatacctttattgctgacggcgtatccatgcatgatattttgaaacagcaatacaaagttgtacccacgcacaatacgaagctattaaacgttgtatatgcccaacaggaggaaagcaaatacctggattgtgatatcggggatgcgctgtttgaaattgataaaacggcttttacatcaaacgaccagccaatctattgctcattgtttttgatgcacacaaaccgtgtcacttttaccatcaacagcccctacacataacaggcataaaaaacgagacactgcttatagtattctcgttttttcactgcttcccccgtcctccaagcgataaggatagccatagccgaaagctccgtacacaccgcatgttttcgcagccgtttcggcggcctggcgcaaagcgtacgttatatcctgcttcacgcaaaaggcagtcaaaaagcctgctataaaagaatctcccgctccaagtgtatctattatatcagcttccacaatcggctgatgatagactcgatcacccgcagacaggattgctccttggccccctcgggtcatacaaaccattttggctccgtacccatgagctgttttggcaagctcaccgcattccgactcactcaaatcgcttcctgaaaaaaacgcatacgtcacataaggacagaccctcctcaaataatcatcctcccgattggttgaaaaatcaaatgagacagggaccagcccgcacagctgcggaagatcgttctcaagcctgctgtacacgctcgtatgcagcagatcatgcccgctgataaaagatacatctttctcctgaaacgcgaggcgaagccgggactgaatgccgcctttatttgatctgacaaaaatgcggtccccctgttcatcaagggtgacaatcgccatcccgttttctccgtgcgcctggcggatataatctgcattgacctgctccagcttgagaacgttcaacagatgcgccgcggcttcgtcattgccgacgattccaatataggaagactcatgcccgagccgcttggcaagcacagcaacgtttaaggcatttcctcccgggtaaaatgtttcttgatcctggtagtaatctacaacattatctccaaccgcaatcaatttcatagcgcttcctcctttatccttttacactgccgcttgcaatcccgcggacaaaatatttctgcatcaataaaaatagaataataatcggcgcggctgaaatcgttaaccccgccagcaggacgccccagtctgtctgcagcgcgtctctgaactgcatcagcccggctggaatggtccgtaaattctcatcatctatgaaaataatcgcaaacataaactcattccatgtatggtaagccgtcaaaatgccggatgtcaccaaaatcggcacgctcattggtaagaaaattctgaaaaatactccaaaacttgtacacccatccaaataggccgcctcctccaattcttttgaaatagaaagaaaataagagcggatcaaaatgatggtgaatgggatccgataagccgcatacggcaggattaacgcccaatacgtattgtacaggccaagcgactgaataatagaataaagcggcacaagactgacctgcggcgtcagcatcaatccgccgagacatagcaccaagaagaatccttttcctttaaactcaaaccgggaaaggccatacgctgcccatgcactgataaagacagtgatcacacacgtcagcgccgtaacgatgacactgttcataaaataagaagaaatcccctggttccaggcggaaacaaaattttccggatgccacgatgacggcagcgaccagctgtgctcaaaaatatcgtcagagtttttaaaggcgctcatcaccatccagagaagcggataggcaatcgcaatcagataaagaaacagaaaaacccacacagacgtttctccgatataccattttcgtctaggcttatctttaacctcaatgtgctggtcaggcacaggctccaacctgaacgaatctgtcttcttctgaggcagcatcagttactcctcctttccggttttaaagaacttcatttgcatgagcgataatgcaagcgtaatgattaacacgacagtggcaatcgctgaggcgtagcccatcatatcctttgtaaaggcgcttttatataaaaacgtgctcaagacttctgacgcgtttcccggcccgccgcctgtcaaaatgtacggctcattaaagaccgtaaaggccccggtcagcgtcatgaccaccgcaacaaaagacatctctttcgtctggggaacagtaatatgaaaaaactgctgaattttacccgcgccgtcaagccgggccgcttcatacagttcatccggtattttttgaatcgacacaatgtacagcatcgcaatataaccgacagattgccactgggacacaaaaatgacagaaagcatagctgtgctgtcatccccgagccaggccctcgtcagctgatcaagaccgatggcctgaagcagctgattcaaaagccctgtctccggattgtaaataaaatcaaacaaaagcgcgatcacagtcattgagatgacaaccggcaaaaagaaaacggtacgaaaaaacggcgaccattttctgaccagcttatcctcaagcaccgccgccaaaatcaaaccgccaaatacctggcatacaattgagatcactgcataaagcacattattggtaagtgcctgatagaagacaggatcatgaaataattcaacatagttttttaagccgataaacgttttttccggagaaaatgagctccactgaaacaggctgaggaatacattctcaaaaatcgggatataaacgaaaagtaaaaaaacgagagcgggcaccaaaaacaaataggggattattttattctgattgaccaagggtatctcatctcctttataaaaagaaaaggtgcgaagcttcaccttttctttgatttattcagctgacgccctcacctgctttgctgccttttgaacggctttcatcacctgctgcggtgtcatgtcgccgccaagcatttgctggacgccagttaggtacgcatctgcgacttcaacatcgacatccatatcaaaccatggaaccattgatttggcatcaacaatatgctgaacggcttcacgctgaatggctgttgcattttcttcagtagccgtaccttgcactgcactgtatttcccgacatctttcacgagcttttcgcccattcttttcgacgtcaagaactgcaaaaattccatcgcttccttcggatgttttgttcttgaggaaatcatgaatccttccggcgctcccgttaacgcttctgaagatcctttctgcccgctaatttcaggaaatgggaacatcccgagattaaccggttcaaccagcttgatttccgctgtttccgcatatatcatcgccgactttccgctcttaaattgctgtctcacatattcgtggtcgacggagtttacatgtttattaaagtaaggcatcagctcttgaagcttttcaagtgcttttacgtagccttcatcagtaaattcacccgttttggcgttatagtccttttcccgtgttttttcatcgaccatccgctgattaagcgtgccgatatagtgcgagattgtccaagtcgcctttgttccgaagctgatcggtgtgtagccatgttctttcagcttttttgacacatcgattaattcatcccacgtcttcggggatcaagattcagcttttggaaaatgtctttattatagaagaatgatttagcgtccatttgccacggcacgccatattgcttgttttcataagtaaatggtgtaatttgcgattgaacgagctgtgatgaccaatcggtgtcatttttgtagtaggacgagagatcaagtgctttattgcctctgataaatttaaaagcaaactcatcgctccaagagaagtaaatgtcaggagggctggtggttcccagcatgaccttaattttatctttataggagtcatttaaaacggcttcaatttgtatatcgatatctgggtgttctttttcaaattccttaacaacctcttcaaaataacttttttccggctccttcggccatctgtggaaaaatttcaatgtcacctttccgtccgctgaactgctttggctcgaacagcctgcaatggtgaacatactgacagctgcaatgatcaagaacaacaacattttcttcaaagggttggcctcctctggacattagactataatgttatataacattatagtctaatgcataatggttcctcattttcagatcaatactcaactttccacatgtatcttctatgagataaaggatgatttctcgcctctgccagctcgtctgcatagcttctcagcacacgattgagaacgagcggagcaagatagcctttaactgaatcgtcaattgcagtgaagtcgtaagatgcagcatcaagcacagtgagctttttgccatactttttcgagaaggtaagcgctcgctcttcaagaggtcttgtttcatctaaaccgagcaggatgataaacggcacggattcatcaataatttcaaacggtccgtgaaaatattctccggcatgaatggcgtgggaatgaatccattgcatttccatgagaatgcagatgctgtaggagtaagcgacaccgtagtttgcaccgcttgccatggtataaataatactttctttttcatgggcttttgcaaattgcttggcgttgtcagcttcctgcttaagggctttttcatatacagcctgcaattgatctaagccttcaattgcttgttggaatttcgtattgttttctaatacttgcagggttccaaaaacgatttgatacaaaacgccatagtttgtattgatcgcaagcgcctcatcaccccaatcgtactgggcaacatattgcgcttcctgcgctaaaggagactccggtttaaacgtcatcgcaatcgtaagtgcgcccttgccccttgcaaacgcagcagctttgactgtctccggggtatttcccgaatgcgagcacaaaataacaagagacttttcaccaagctgaacagggttgcgctgaataaattcgttggcgctgtagaggtcggagtttattgattttgactctctgtcaaacacatacttactcggatacataatggcagaagaccctccgcatgcgacaaagaatacatgatcaatggttttccctttcaaatcctgcaagaaagcttgaacctcacgatttacttttgctgtggcctgactcaaatccttcactccccgtttttattatataacgttatataacattatatattgttatattaaagtccgcgggtaggattgtcaatattattttctgaaatttctcaataatttattcgaatgacagacaaagggtcaataagcgaaaaaatgcccaaatcaaaagccagaacttgacttaagctctggcttcgctgttcaatccgcagactgacgtcttatttaaaaaataccttgtctatattgtacttcgagtgctgtgtattgatgatatatgtttcataaatctctctttccattggatcatcaactacacatacctcaattttataaacttcatctctgtgatgtttgatcggtgaaacagtgtcttcgaaatgcttcttaattctctgtcttaactttctggctttaccgacaaacagcagctcgtcatgaatgttgtaaaacataaaaatgccgcctttgtcccttgggatctggtgaaagtcgatgaatccgtgaatcggttttatcttcggctcgttatcattagctgactgctgtcgttcagtgatggtgacattcggtgcgggtatatcaatttttatcaaaatcagttcacgtcctctttttcattaaagataaatgctaacacatacagaaaagaaaagctagaacagctttattatatttgtttgttatgctcttgcttattatgcaagtgctccggctggatgataaggactaaggtctaattctgtctgctttccgagaactagctttgcgagctctgcacccaagaacggtcccatcgtcagtccagaagcacccaaaccgtttgcagcatataggccttgaacattcggcacggcccctacgaccggcagaaaacccggtgtaaacggcctgaagcccactcttgtttcaactgcagcggcatcagcaagacccggtgcaacggctaacgctttgctcaatacttcgtgcaggcctccggctgtcacacgaagatcatcaaggcctgcatcgttttcgtgtgtggcgccggctacaattctgccgttatcaaacgaaagaatgtactgatcactcggcggcattacaaccggccacgatcctgtatctgtatctgtcatttcaaaatgcataatctgcgctttttgaaatgacacttgaaaatgaatgccaagagacttcaatatctcattggcccatgctcccgccgtcacaatgaccgcgtcagccgcaaactgctttgcatctgtttgcacgccgttgactgttccgttttcaaaaagcaaagacgcatttcctttgatgaccgttgcgccgcgtttctctgcagcgcttaaaagcgaccggcacagcgctcttccgttcacacgggcggcaccgctgatatgaaccgattcatagccgtcagctaaaatcggaaacagctttttcgtttcacttgcagacaagcgggtaatgtcgccgatttccggcgcatcctcccgtctcttatacgccctttcctccattttatcgagtttagacgcgtccgtatgaatgctgatggcaccgacacgtttgtatcctgtatccgtttcaccgtctttttccaattgatggattaaatccttatagtaccgggctccccccttagcaagctggtaccaatcctgattacggcgttgcgagagccatggacagacgatccccgccgccgcatcagtcgcttgtcccggctctttccgatcaatgacagtaacgcgagcgcctgattttgcgagatgataagccgtcgacgcgcccagaatccctgcgccgacgatgatgtacgatttcatatgcaaacaccttttctattataatgtctattcattttaccaaatcgaatgctttccttcgaccttttgccctaatgtggaaaaaccgcgaagttcgtccaatctctttactctcctatcgaatatcctgtcactatcaatagagaaaggatgataccatgagcgaaaatcgtcatgaaaatgaagaaaacagacgcgatgcggcagtcgcaaaagtccaaaacagcggtaatgcaaaagtcgtggtcagcgtgaatacagatcaggatcaggatcaggcacaggcgcagtcacaagacggagaagactaatgaacgaaaacatcattcctctcaacagacatactcaagagatacccactactgaatctgttatcaaaaacagcggcaactcagaggtccatatcgacattcacattgatacaatgccaattgcttttgctatattatgctctgcattagccgcaaagcagatgacaaaagaggaattcgatatggcttatactcaattgcgagagatgaacagagaaaataacagcagatcatctgtaaagcaaattatcaatcaggagacagaagaagagtaaaaaaccgcggcccctcggccagcggtttttcttctgcatacaaaaaggacgcgactgaaaaccagtcgcgtcctttttataaaaaaataatcgattgaaccttccatttcgaacttgattatttttataaaatggtacggaatgatttataaaagggtcacccaaacccttgatttaaagccatttcttcagatggtttaaatgatgataatcttaacttggcaccgtgttggcatgagctgaagccgcatgatataagggtttacagtaataattcacggttgccgccgtgagtaagtttcatatcttttgaaagttattattgaagtaatgcacctgttagttgaactattccacggcttatttaaactgtactaatcttttgaaatagaaataccgttctcaataaaatgctttattcatatttaaatttttgaggctactaggcatacatccaaaccaagttttgaccctgagcgtaaactagttaaaagtctaattgcaataaggagtgaacctcgaataatggtatatcaaagacaaatgacaccctatgccctgaatccccgggatttacaaaattgtttgtatcgtttcacgtatttgtggcttagaaataatgataatttctggtatttcttaacggctatcggagaatcaagagtttatggatataggtttttcggtggaagatggaataattattccgttgatttaagagatattgtttccttctattgttctcctccgactccaactctatattaaaacactgagcctgatatttgcatatgaagaaaatatttgtgaattaaaaaaggtcaaagcaaaatgaattgaatcttgaaatatccaggattcaaaaaaacaaagatgtaatcattttctaaaattacaataggcactatcttacacattcgaaactatcacaagcttcaggggttgaatatagaggcttacacgctttcagacacggttggacactagaacactaaaacaataagtgaaaaatattcacacataactgaaaaaatcgaacaagatgagcttgcaaaatttgcttcttactcaacaagataacaaaaagcttggcataaaaattggcacaatagaaacttggcatatgtcgaaaataagaaaaacccttgataaacaagggtttttcgttagttatccaatagaaccttccatttcgaacttaatcaaacggttcatttcaactgcgtattccattggaagctcttttgtgaatggctcgatgaagcccattacgatcatttcagttgcttcttcttcagaaataccgcggctcatcaagtagaagagctgctcttcagatactttagacactttcgcttcgtgctccaatgaaatgttatcatttaagatttcattgtaaggaattgtgtctgaagttgatttgttatccataatgagcgtatcgcactcgatgttagagcgggcgccttccgctttgcgtccgaagtggacgattccgcggtacgttacttttccgccctgttttgaaatcgattttgatacgattgtagatgatgtgtttggtgcaaggtgaatcattttcgcacctgcatcctgatgctggcctttacccgcaagagcgatagaaagcgtcataccgcgcgcgccttcgccttttaggatacaagccggatatttcattgtcagcttagaaccgatgttgccgtcgatccattccattgttgcgttttcttcacagactgtacgctttgttacaaggttgtaaacgttgttcgcccagttttggatcgttgtataacggcagtagccgccttttttcacgatgatctcaacgaccgcactgtgaagtgagtttgttgtgtaaacaggcgcagtacagccttcaacataatgaacgcttgcttcttcgtcaacaatgatcagtgtacgttcgaactgacccatgttctcagagttgatacggaagtaagcttgtagcggtgtttcaaccttcacgcctttaggcacgtagatgaaagaaccgccggaccaaacagctgagttaagcgccgcaaacttgttatcagtcggcgggattacttttgcccagtgctcacggaaaatatcttcattctctttcagcgcgctgtcagtgtctttaaagacgatgccttgtgcttcaagatcttctttcatgttgtggtatacaacctcagattcgtactgagcagaaacacccgcaaggtatttttgttcagcttcaggaataccgagcttgtcgaatgtttgtttaatttcttcaggaacttcatcccaagaacgctctgaacgctcagacggttttacgtagtacgtaatttcgtcaaagttcagtgagtttaaatctccgccccattgaggcatcggcatattgtagaaatgctcaagtgatttcaagcggaagtcaagcatccattgaggctcttctttcatgcgagaaatttcttctacgatttcttttgtcaatccgcgctctgaacggaaaatggaaacgtccttgtcgtgaaaaccatacttgtattcaccaatatcaggcatttttttagccatccattttcactccaatccttttaattgccgccttcttctttcgcgactcctttttcaagtgctttccatgacagggttgcacatttgatacgggcagggaattttgaaacgccttgaagggcttcaatatccccgagatctatagaatcatcatactctttcccttgcatcatatccgagaaaatcttagacatggaaagggcagtttcaatatctttccctttaatcgcctgagtcatcatcgaagcggatgccattgaaatggaacagccttccccttcaaacttcgcatcttccacgatgtctccgtcaagcttcattgtcagtctgatgcggtcgccgcatgtcggattgttcatatccacgacaatgctgtcattcaaaacccctttatttcgcgggtttttgtaatgatccataatcacctgtctgtacaatgtatctaagtttgcattaaaagacatttgtaaaatactcctttgtcttttgaagagcttccacaagcttatcaatctcttcctctgtattatacagataaaagcttgctcttgcagtagcagttacatccagccatttcatcagcggctgcgcacaatggtggccggctctgactgcgattccctccgcatcaagcacagtcgccacatcgtgcggatgaacatcatcaaggttaaatgtgacaagcccggcacgctcttccggcccgtaaaccgttacgccgtcaagctggcggaagcgttcaagcgcataagctgcaagcttgtgctcatggcgggaaatctcatcaagaccgatttcttcgagaaaatcaatggcggcaccgaggccgattgctcctgcaataatcggagtacccgcttcgaatttccacggaagctctttccaagttgattcataaagcccgacaaagtcgatcatttcaccgccgaattcggcaggctccatgttttccagcagggctttctttccgtacagcacaccaacaccagtaggtccgcacattttatgggaagaaagcgcaaagaagtcgcaatcgagatcctgcacgtcaattttcatgtgaggcgtgctttgtgcaccgtccaccacaatgacagccccattgtcatgagcgattttcgccatttctttaatcgggttgaccgtgccgagaacattagatacatgagacaccgcaacaatttttgtgttgcttgtgaccgtttctctgacgtcttctaaagaaatcgttccgtcttcctgcagcggaatatattttaatgtggcgccagttgcttttacagcctgctgccacggaatgatattcgcatgatgctccatgtaggtgatgaccacttcatcaccaggtttcaggttggcgcgcgcatagcttaacgccaccatattcagtgatgtggtcgtgccttttgtgaaaataatctcagccattgacttcgcgttaataaactttcggactttttcacgcgctccttcataaccatctgtcgctctggttccaagtgtatggacgccccggtgaacattggaattgtattggttataatacttatccagtgtttcaatgacagcacgcggcttctgggaagtcgccgcgctgtcgagataaacgagatcatgtccgttcacttgctgatgaaggatcgggaactgttcacgaatatctgtgatattcattacttcactttcctttcgataacagaaactaattgtttcttaacgccttcaatcggaagttcatttactaccggtgcaaggaatccgtaaatgactaagcgttctgcttcttctttcggaattccgcggctcatcaggtagtaaagctgaatagggtccacacggccgacagatgccgcatgtcctgcagttacatcgtcttcgtcaattaaaagaatagggtttgcgtctccgcgtgctttttcgctgagcatcagcacgcgtgattcttgctccgcattcgctttagaagcgccatgttcgattttgccgattccgttaaagatagaagaagcggaatccttcatcacaccgtgcttcaagatatagccttcagaagctttaccgaagtggatgatttgtgttgtgaagttttctgtttgctctcctcttccgacaacaaccgttttcgtatcgccgtatgtgccgtcaccgtaaaggtttgttgtattttcggaaatcgtgtcgccgtcgttcatcaggccaagagcccactcgattttgctgtcgcgtccgcgcgcagcaccgcggcggttcacataagttgtcacaccgcttgacagattatccaccgcaccgtatgtcacgctggcattatcacctgtgatgacctcactgataatattgaagacagcgtctttcgggtttacagtgctgatgtagttttctacatatgttacagagctgtggtcttcagccacaatcagcacgtggttgaatagagctgtatcattgctttcgtggacataaacagcctgaaccggcgtctccacctgaacatttttcggaacataaaggaatgctcctccgttaacaagagccgcgtgaagtgcagttaacttatgttcgtcaaccttcacgccgtccttcataaagtatttctccaccaagtcgctgtgctcgcgtgcagcagtcagaatatcagtgaagatgacgcctttgtctttcaattcttgagaaagagaaagatgtgccggcgtctggtcacgctgtacgtataatgttttatcttcgttttcaatgtcgatcagcgcttttacttcatcagtcaaatcttctaatgaagaaagcggttcgttatccactgtatgcttcgcgaaattcgtgaagttccagtttgtgatttttgttttgtcaggtttcggcatcggcagatcctcagcttgttcaagagcctgtaagcgcaggttcttcagccaggcaggttcttggtgcttttcggaaaagcttttgagatactcctgatctacggatagttttgtacctagtgtcatattaatccccctaacgcttacgcttcttggccaacagtttcgtcttcaatgccaagttcttgtttgatccagtcataaccttctgcttcaagacgctgtgcaagctctgcaccgccggattttacaacgcggccttgcatcataacgtgaacaacatccggagtgatgtagtttaacaggcgctgatagtgagtgatcatcaggcagccgaagttttcgctgcgcattttgttgatcccttttgatacaactttcaaagcgtcaatatcaagacctgagtcaatttcatcaaggatggcgattttcggttcaatcatcattaattgaaggatttcgttgcgttttttctccccgcctgagaagccttcgttaagatagcgctgagccatttcagggtccatttcaaggaactccatgttttcgtccattttgcggatgaatttcatgagagaaatttcatcgccttcttctctgcgcgcgttgattgctgagcgaaggaagtcggcatttgtcacaccgctgatttcacttgggtactgcatcgcaaggaataagcctgcctgcgcacgctcgtccacttccatctccagtacatctttgccgtcaagcgtgatgctgccttttgttacttcatatttaggatgccccataatagcagctgataaagtggatttaccagttccgttcgggcccattactgcgtggaattctccaccttttatttcaaggtttacaccctttaagatctctttcccttcgatttcaacgtgaagatctttgatcgttaatgttgaagcagccatatctatacctccaaaaatatataatcattattctcattttattctcattctaattttataacaaatgaaaagtaaatacaactttttatcgtgccttgcacattcctcaagtttaacaaagatcagcactttattaaagcgattgaaaaagaaaaagagtggattcccacccttttttaaaagattgattttctcaataagctcccgcagaaatccgcttgcttttttcgtaatcaagctctctctgccgctctactttcattcttgtttccagccggcgtccatattcctcgtatccaattccgtgtgacagctgcatcgctttttccatttctgacgtataatcgaggttcagtctgtcctggctactgcaaataatgaatcaatcccttcatatatttgctttttattgtaccagtgctgcgttggatgccgcaaaaacgatttggcgtgaaatagcggcagatgagacgaaagcatcctttcagaacaaatgagaatggtttttcggaatattccttctcttaatgcgtggtgtttccgaattcctcaatgcactgttgaacgactgtcacgccttggctgaaagctgcgccgcctccaaatgccgctgccacactgacggcttcgagaatgttttcttctgtcgctccctgatcgagacagccttttgtatgatagatcatgcaatattcgtcctgagcattgatggcaattccgagggcgatcagctgtttttctctttcagtcagagaattcccggcaaagcactgttcagtaaattcgttaaattttcttcccatcagcggcatcttttgttcaaatgtgcctaaaccatgtttatattgttttaacgcgtcctgcatgcttcctctgtcttgattcaaagaaaatccctccatctgtttaacattcctttttattatgaacagcttttaggaaaatacgcgaaaaaaccccggaattctcatccggggtttcagtcttattcagatacaggaagcacagctccgtcgtattttttctcgatgaagtctttgatctttttagagtgaagaacttccatcagcgctttgatttttgcagaatcttcttcgccttttcttactgcgatgatgttagcgtatgggttgtttttcgttgattctacttcaattgcgtcttttttaggatttaatttattttggatcgcatagtttacattgatgaagaccgcgtctccttctttgttttcatatgcttttgccgttaattcaggcgctactttttcgaattcaagatttttcgggtttttcttaatgtctttcaatgttgcgtcaactgtttccactttagaatcaagagtgattaatccagcgttttcaagcattgcaagcatacgtccttgttcagcaacgttgtttgtcagaatgattgtcgcaccgtctggaaggtctttcagtgatttgtatgttttagagtaaataccgaatggctctaagtgaacagcgccggcattcacaagtttgtaatctgtgttttctttcatttcttgctcaaggtaaggaatgtgctggaagtagttcgcgtccacttctttatcagctaaagctttattgtacattttgtaatcactaagcactttcactttcagcgtatagcctttttctttcagcaatggttcagcttcttttaaaatttctgcatgcggtgttttcgttgccgcaacgacaatttctttcttgccggattcagcgccgttattcgaaccgcaggcagccataactcctgcaaatacaagcagtaatgcacccaaaaatagctttttcaatgtaaatcctcccttatcgtttgtctataatatttgttattagatcaccgatgatttgaataataaacacgatgattaaaataaacacagtagcaacgaaggtaacatcagcgttattagactgatatccttctacgtacgcaaggtttccaaggcctcctgaaccaatggctccggcaattgccgttgagccgatcaaagcgatggctgtaaccgtaatgccagaaataagagcaggcattgattccggaatcagcactttgaaaataatcgtagacgttttcgcgcccattgatttagctgcttcaatcacacctttatccacctcacgcaacgcgatttcaacaaggcgcgcgtaaaatggtgccgagccgattaccagcgccggcaatgcggcgtttggccctaagatcgtgccgactaaaaatttcgtaaaacctaatagtaaaataattaaaataaggaacggaatcgatctgaatatgttaacaacggccgcaatcactgagttgaccgctttattctgccagaggcttcctttgctcgtcagaaagagcagcaagccgaggatgaccccgatgacaaaagcaaacagtaaagaaatcagcgtcatataaagtgtttcatatgtcgcgttccataattcagttaaatcaacgttcgggaagtatttttcaaacattcgtgatcacctctgctttcacctgtttgtcattaatgaaacggatcacgttttgcacttcttcctcgtccccgtcaatgtggatgaacagtgaaccgtaagccccatccttcgtctgcgaaattttcccttgcagaatattgacgctgacattgaagtttctgatcatctctgtaatcagaggctgttcagctgactcaccgacaaatgtgagctgaaccatttttcctgatgctgtatcatcaagaaggtgctgaagcgtctctttcgtttcttccggctctgtcacctgctgaacaaatcgttttgtcatttgttcctttggatttttaaagacatcgagaacctcgccttcttcgaccaccttgccgttttccatgacggcgactctgttgcagattttgcggatgacatgcatttcgtgcgtaatcagcacaatcgtcaaaccgagtctttcattaatatcggacaatagatccagaattgaatctgtcgtttgcggatctaatgctgatgtcgcttcgtcacaaaggagaaccttcggattgtttgcaagcgctctggcaattccgacacgctgcttctgaccgccgctcagctgggacggatatgatttttcttttccttctaaacctaccagtttaatcagttcattggcgcgcttgatccgctcgctctttttcaccccggcaatttctaaaggaaacatgatattatctctgacagtccgcgaccaaagcaaattgaaatgctggaaaatcatactgatctcatggcgtgcttttcttaaaccgcgtccatttacttcattaattttggttcccgccacttccacggttcctgaggttggtttctcaaggccgttcagcagacggattaaggaactcttaccagctccgctatatcctataattccaaaaatctcaccttttttaatggaaagcgagacattttggacagcattgacatctccatgtttcgacttgtaaacttttgaaacatcctgaagattgatcaaagcaatcacctgccttaacactattctaagaaatcttccggttttttctgcaaaagaaaagcctttctgcacacttgagcagaaaggcttatataaaatgcctttctctcatctttcaaagctgaacgcttcgtgtgaattggcaccatttcaacagtgttgatggttgccgggcttcatagggcacttccctccacctctcttgataagagaaatatatagtctttttcgtccggaaattcttaatgtagaatagcacggcgaatgattaaatgtcaataaaataaatgatgtcaacttttactattataataatttattattttttaattttttaaaatcctctgaaaaaatccatttgtcagccagagaatggcttccagctttaacagggccctgaatgacccctttactttgaggcttccgctctgaatcaggtgctgaagggaaatgtctccgtgcaataaatcaataatttccgtttggtttccgtaaaaggtcaggttggacgtttggggcggagaaacttttttcatttctccctgttcgtttattgagacggttaaggcttctgcttctccttggaaggtaatgagcaatgttgaggcattcaaaaggggttttaaaaacagatgctgatactcatcctctaaaacttccgctttctccatatgtacaacctcctatttgttggtcatacatacacatttctctctttgtcgcaagaacccctttataaaacgaacgacaatttcataggatatgctgagaaatatgtcataaatgggatgcggaagatgatttttgtttgatcagctcatataaataagaaacggaatgaaatgcatatcctctttcgaccatctttccgcctttaaacagcagaaaacaagggacgctttcaatttgatacgcttttgcgaatgtcggagagtaattgacattgttttgatagaaggcgacatccggcagcatttctttcaccactgtcagcattttgcttgcaagctggcaggtgccgcaaaacggagtatataaatatagaaggtacacatcatcttcaatgtgatcaagttcgtgttcttggagttctttcatgctatacacctcgggactttctttcaagaaaaatagtatggacattcagattcgcacgcagtaatacagaagcgacatggtgcctgggagcagccgctacttccttataggctctgtcgatatggagatggcaggcttcattaaattcacgcttcagctgttttctcaatttctcacctgattcatcagcatcaactaatatatagacgtctttatcataaagctcgtcagccaattcctcgagcctcagctggctgattgttccgtttgtgcagataatgcgcaccggttcattcaggacgctttcgattttctctttatctgatttcccctcgacaatcataaccttttccagctcatccatcttcatcttgttcacctgccgcgtcaaatttgaaacgttcagattgtaaaagaaggcagtgaaattcaccgccaacattaacaccagccgttttcgtagtcacaatctacatattttgcgtcgtctccagagaccacatcggctgtcttataaaatttctcattttcaaaggaataaccggacttaagctcatattcattcatgcttgtcatttggccgatcatctcattatcatgatataacgagagccggccattttgaaagcggcctgtcacgtcattggtgacatcgagcttttgtttgtcgaaagccatattggacacctcccataacgttagcgtgtccaattgcttttacggctatcctgttttagtcttcttgtgtcatctcttcgtattgctctgctgtcatcagtttttcaatttcagaagcgtcagatggctcaacgacgatcatccatgctttttcgtacggagattcgttgacgaattccggactgtcatcaagatcttcgtttacttccacaaccgttccgttaatcggtgcataaagctcagataccgttttaacggattcaacactgccgaatggctcgtccgctttgatttcagcgcccacttcaggaagttcgacaaacacgatgtcgcctagttcggactgggcaaaatgcgtaattccgattctggctttttctccttcaacttttacccactcgtgttctcctgagtaacgcaaatcttttggtatgctcaattgaatccctccattttttacagcactacaataagaagataccacacttttcaaaaaaaatttacattaagcccagttttcttcaaattggtcttctttaaatccgacagtcactttttcaccgtctgttgtaagcgggcgtttgatcagcataccatctgaagccagcagctcgagctgttcgtcctctgacatgtgatacagcttttccttgagattgagctcgcggtatttcatgccgctcgtgttgaaaaatttcttgagatccagcccgcttttttcataaagcgcttttaattcttctttgcttggcggctgctcagcaatatgtatttcgtttatttctttcccatgctcttcaagccacttctttgctttgcggcacgttccgcatttagggtaccagtaaaaagttaacgacatcttcttccccctcaataaaataatcgaggttattttaacacagtttgttttaaaaacctaaaacagtgcttcttaaaaaagagctccgcgcatgcggagctcatggccaatcagacagtatatttctcagcctcaaaaatgcctgccgccgcctcgcgttttttctgaatcacgtttttaggcgttacgcgtgtcagcttgcgcagagcggaaagcatcatgcggagtgaatctccttcttccattgcgataagggattccttcgcatgcgcttcaatttcgttaaaggcctcttgaacgaaaatttctgtgtacagcaccttttgcgctgctttttcagcgccttgtgcggcaatggccttttccgttctgagcacggctgattccattgcgtatacattgctgacgatatccgctacgttcacgagaatttcttgctcacgatcgatcgcttttccgtatttttgcgcggctaggccggcagcaaacaacgcaatttttttggcttgcttgacgatatatttctcctgctctaagacgccgcttccaggctcttcaggcataagcatcatgagttcttcctgcagcgactgcgctttttcgaataaaggcagctcgcctttaagcgcttttttcaggaaggtgcttggcacgattaaccggttgatttcgtttgtgccttcaaaaatccgattgatccttgaatccctataggccctttctacttcgtattcctgcataaagccgtagcctccatgaatctgcacgccttcatcaacgatataatcaagcgtttcagagccgaataccttattcagagagcattcgatggcgtattccgcaatcgatttggcgatttgccggccgtccttgagatcttcggccgtgaactggctcatattgtcttcaaacagcccgacggttctgtatacagagctttccatcgcatacagccttgaggccattgtcccgattttttcctgtgtcaatgaaaaaccagcaatcggcgttttaaattggcggcgctgatttgcatatgccgcagacagctcgatgacgcgtttagatgcgccgattgtgccaaccgccagtttgtaacggccgatgtttaaaatattaaaggcgatgacatgccctttgccgatttctccgagcaggttttcctttggcacttcagcttgatccagaatgagggttcttgtcgatgatcccttgattcccattttcttttcttccggtcccgtggagacacccgggaactctttttctacaataaaggctgaaaacttgtcgccgtctatcttggcgtaaaccacaaatacatcggcaaaagcagagttggtaatccactgtttttcccctgttaatacataatgggttcctgcttcattcagcacagctgttgtttttgctccaagtgcatcagatccagagccaggctcagtcagagcataagcggcgatcttttcgcctgaagcgagtccaggcaaatattttttcttttgttcttctgatccgaaaaagacgatcggcaaggaaccgataccgacatgcgcgccataagaaagagaaaagcttcccgcacgcgaaaatttctcagtgatgagtgccgagctgattttatctaggccgagcccgccgtattcttccggcacatcggcaccaagcagccctagttcgcccgctttcttcaacagtctgacagaatgctcgaattgatggttttcgatatcatctatatgagggagaacatcttgctcgatgtaatcctctgttgttttcgcaatcattttatgctcgtcagtgaaatcctccggtgtatacatttgatcgtatgtgacatcctcgattaaaaatccgccgcctttttgtacgtcagccgctttttttgccatttgtttttccccctttagcataattcaaatacaccggccgctcccattccgccgccgatacacatggtcacgactccaaattgctcgtttctccgtttcatttcatggatgagtgagagtgtaagctttgtgcccgtacagccaagcgggtgtccaagcgcgattgcgcccccgttgacattcactttttcttcatcaattcccaattccctgattacttgaatggcctgtgaggcaaaagcttcattcagttcaaacaagccgatgtcctgcagctgaagtccggcaagcttcaaagcgcgcggaatcgcttccaccggtccgattcccatgacttccggcggcacgccgcctactgcaaaggaacggaatttcacaagcggcgccaggccaagagcatcggctttttcccggtccatcagcatgacagccgccgctccgtcacttgtctgcgaggaattgcccgcagtcaccgtcccatcaacggaaaaggccgggcgcaatgtcgataagatgtctgcagtcgtttgcgggcgaacaccttcatcctgagaaaacacaaactgtttttccataggcttatggtcttctccgatttctgtcaccgtcacttctacgggtacaatttcatctttaaattttccttctgcaagggctttagcagcgttttggtggctgcgaacggcaaacgcgtcttgatcctcacgggagacgccgtattttttcgcgacttgctcggctgtgtggcccatgctcatataatattccggtgccttttctgccaaagcaaggttcggacgggtaacatgccccatcatcggaacttgcgacatggattctgctccgccggcgatcgctgtatcgtaggcgcccagcataattttttctgctgcatatgcaatagactgaaggcctgaagagcaataacggttaactgtaatcgccggaaccgtgtacggcaggcccgcgagcgcaccgatatttctcgccatattaagcccctgctccgcttcaggcgttgcacagccaataatcaaatcgtcaatattgccttcgtaaccgcctgcccgtttcagtgtctcttttacacaaatcgctcccaaatcatccgggcgaacggtggccaacgatcctttttttgcttttccaaccggtgttcttgcacctgacacaatgactgcctctttcataagctccctcctaattccgtaaaggtttacctttcacaagcatatgctgcattctcgcttgagattttgcctctcctgacaaactcaaaaacgcttctctttcgatctccaataaatactcttcatcaacctctgtaccaaacggcacttttccgcccgcaatgacataagcgagttttttcgcgatcttaaaatcatgctcagatatatagccggacagcttcatctgctcagcgccaagcaagagtgccgcataaccggtttctcccggcaccttgaccttttcttttacaggcggccgccagccggtatcgtataaagatgcggccagctgcttcgcatcgtataacaggtggtcttgattcacgctgatctgatccgtttcttttaagatgttcatctcacgagcctcttgagcggaagcggacactttcgccatcgcgattgtttcaaatgttttcattgccgcattcatcggatcatggccgcggcgaagatggttgatgtacagctctttgttacctcctccgccagggatgaggccgacaccggattccacaagtcccatataggcttcgcttgccgcttgaatgcgcgccgccggcaggcatgcttccgttcctccgccgagcgtcatgccaaatggcgcggcgacgaccggtttcgcactgtatttgatcttcatcatcgtctcctgaaaacggcggatcacaaaatcaacttccaaaaagttgtcatcttggacttccattaagatcatggcgagattcgcgccgacgcagaaatttttcccttggttgccgatgacaagccccttgtaattccgttctgtttcctctaatcctttgtggatcatttgaatgatatcgaggccgatcgcattgcttttcgaatgaaattcaagaagggccacatcatctccaaggtcaattaagcttgctccgctgtttttcgcaatcacgccttttgtttctttaagtgcttgtaaatgaattcgttttttattttctttcacggctctgtattcgccgcggtcataataaaataccgttccgttctctttgatgtagaaggtttcatttcctttgtccagcatctcttttatccagccaggcatatctgctccaagctgctcaagcttttccgctgactgcttgaggccgatggcgtcccacatctcaaaaggtcccagttcccagccgaatccccacttcatggcttggtcaatcgcatgaatatcatcggcaatctcgccaagcagctcggctgagtaaagcagggtttgagaagtgatattccacagcaaacggccggccctgtcatccgaataaataagcgctttcattttggcttttgtcccttttgcctgttttgccgcttcaagtgccggtgatttcatttttgtccgctcgccgtaagtaagcgtcactgggtcaagctcataaatcgtttttccttcttttttataaaagccttggccggccttgcttccgatccaccctttttccagcatatcgttcatgaagcttggaaggcgaaacacttctttttcatcgccatcagctttgtcatacacatttcgggcaacgtgggcgaatgtatcgaggccgaccacatcaagcgttctaaaggtggcgcttttcggcctgccgatcagcggtcctgtgatcgaatcaacctccccgacctgataaccgcctttcagcatttcttggactgtcacgagaagcccgtaagtcccgatgcggtttgcgataaagttcggtgtgtcctttgctgtaacaacgcctttcccgaggacattttctccgaaagctgtcataaactttaaaatatcaggatccgtttccttaatcggaatgatctctagcagctttaaatagcgtgcgggattaaaaaaatgcgttccgagaaaatgggctttaaaatcatccgaccggccttcagccatttcctgcactgatatgccggatgtgttgcttgagacgatgcttccagtctttcgatgttcatccacaagagcgaaaattttctttttgacttcaaggttttcgacaacgacctcaataatccaatctgcttctttcagtttttctgcatcatcctccagattgcccggtgtaatataggaggtatttttcgctgatgtgaggggagcgggcttttgtttcagcagttttttcaccgcctgccggctcagcctgctgcgcatctccggactgtccttcgtcagcccccttttttcctcttcctttgtcaaatcgttcggcacaatatctagcagcaggacaggaattccgatgttagccaaatgcgccgctatcccggaacccattacccccgatcctaaaacggctgccttccgaatgtgtttgtgcatgagatatcccccttgaacattgaatgaatagtcattcattttttgaccaaaaaaaatgaaacccgtttcttctttcatcttaaaagatttccggttcgacttcaatagctaatttgttatttttttgtatgaagcctataaaagtcgggcaacttaagcccggaggtgaagggaatggtacgagagaaaaaaaatccgtcttcagcggcagtcagcgcggcgagcgtaaagggagatgccggtccgactcagcattacggcggcggaaaactgacaagtcaaaatcagcagtataaaaaacataacatggaacaatcataatgcagctgcttcccgcggctgctttcactttttcaaaattccttttaacacaaacgctgcattggcaggccgctcggcaattcttctcataaagtagctgaaccagtccgttccatatgggacatacacacgcattctgtagccttccttggcgagttccttctgacgctccggcctgatgccgtatagcatttgaaactcaaattgcgacgcggggatttgatgttcggtgacaagctgtttcgtaaatgcaatgatgtcatcgtcatgtgtggcgacagccgtgtagttcccgcttaacaactgcagctttattaagctctgaaaatgaaggtccgttcctcttttgtcgggaaacgctacagccgcagattctttataagcgccttttacaagtctgagattcggctttaagtcccgcatctttctgatatcttctgccgcccggtacagatacgcctgaatgaccgtgccgagcttctcaaattcctgtttgcattgcctgtaaatagaaagtgtctgttcataatgagtatagtcttccatatcaatggtcacagcaacatcatattgcttcgcaacggaaagaatggcgcgcaaatgagtaagagcaagttcttctgaaagatcgagcccgattgaggtcagcttaagtgaaagctctgaattcaattgatgttcggcaatggcttgaatggctttcttgcattcctctgcgacttggtttgcttctttttccgaagctgcatactcgcctaaataatcaattgttgcacacaaaccggatctgtttagccttttgacggtcttaaccgccgattcaatcgtatcccctgcgacaaaccttcgtgctccaagccgcgttccgtatgcttttgcgaacttggtaagtgttttattttgagataagaataaaaacacatgtctcagcatccgactccctcccgccgtcatcttcaaaacacctgtatataactcccagtctgaaggaaactataaaatgaacagaaaccaaaggaggatcacaatggataatcagcagcaatctcaaatgccgccttccgttatttcgacaaaggatcatttgtatctcaatgacatgctgaactggaatttgctcgcgatgaagaaagcgcatttcatggcgcagcagtgccaggatcaaacgttaaagcaagaactcgaccgcgtcggacacatgcatcatgatcactatcaaagaatattaaagcacctgcagccaggccagcagcagtccggctacatccaataaggaggcgccagaatgaatcagcaaaatcaaaaaatcagcaacccgcagacacctgtaccgacaacatcggaaatgaatgacagagatttcgtcaacgaattgctgacaaccgaaaaatacatgacaacagcttattgcactgctttgcacgaattcagccacgagtctctttatcaggatattcaatccatttttgatgagtcacaaaaagcgcaaagaaaactatatgatctcatgtttcaatatggatggtattctgttgaagcggaggatgcacaaaagctgcagcagtcctatcaaaaattccagcagaccattcagcagcagtctccttatcagcaataacaacattagtaaaaaggatacgatgttctttagggcatctatcctttttttgtgtaaaatcagttgacttttcatttacgcttatttatatttaataagcattaactattttgtcattaaaatatatatacagtgtatgtaacagaggggaaatgaatatgaagagtgcggatcagttaatgtccgatattcaattatcgcttcaggcgctctttcaaaagatacagcctgaaatgctggaaagcatggagaaacaaggtgtcaccccagcacagctgtttgtgctggccagcctaaagaaacacggcagcctcaaaatttctgaaattgccgagcgtatggaggtgaagccaagcgcggtgacgctgatggcagatcgccttgaacaaaaaaatcttatcgccagaacacacaacacaaaagacaggcgagtgattgatctcagtcttactgacgaaggagacagaaagttcgaggaggttttggcaggcagaaaggccattatggcgcgctatctttcctttttgacgaaggaggagatgcggcaggcggcgcatattacagcaaagctcgcacaagcagcagaaacggatgaaaagcaaaacatgaaaagaggaaacggatgaaaatgagtaaagaaggcaaacaatcaaaacgaacgttattaataacaggcttaattattgccatgtttttttcagcccttgacggtaccattgtcggaacggccatgccgaaaattgtcggtgatctgggcggtttgagcatgatgacctggctgacaactgcatatttgttaacatcaacaaccattgttccaattgccggtaaactggctgatttattgggacgccgcattgtctatgtatcaggtttaattattttcatggctgcttctgctttgtgcggaatggccaacaacatgacagaattgattatcttccgtggactgcagggaatcggcggaggcatcatgatgccgatggcgatgattgttatcggtgacttgttcacaggaaaacagcgtgctaaattccaaggtgtctttggcgcgatttacgggctggcttcagtgattgggccgcaaatcggcggctggattgtagactcgttaaactggaaatgggttttctatattaacctgccagtcggaattattgcggttatttttattgccagaggattacagggacgccagcagactggtccgatcaacttcgatatcgctggtattttcacaatgattgtcggtgtggtcagcctcctgctcgccttaagctttggtggaaaagattatgcatgggattcatggcagattcttgggttgttcgctctcgcactgatcggcattgtcagctttatcatcgtagaatcaaaagcaaaagagccaatcctgccaatgtatttatttaaaaacagaacatttacatttctaaacttgatcggcttctttatgagtatcggtatgtttggcgccattacgtttgttcctttctttatgcagggaattgtcggtgtaagtgcgtctgaatcgggtacaattatgacaccgatgatgatttctatgattattacaagtatcatcggcggacagcttgtttataaaatcgggattaaaccgcaaatcattgcaggcatgctggttatggccggcggattcctgctgttaacgaccttggatctcgacacgagcaagcttgtcgctacatcttttatggcgattattggtctgggaatgggtcttgttatgccgattctgacattggctttacaggaaagcttttcgaaggaggagcttggagttgtcacttcatccagccaattcttccgttctatcggcggaacattcggcattaccatgctgggagccgtaatgaatgcgagatcaggaaatctattaacagataaattggttccatatttagactctcttccggcacaggcaagctcgtttgccgcccagctaaagggtatgattgatacaaatccgcaagggctgctgcaatcactgttcagtccggacgcggtcaaacaaatccctgcggctttctcatcccatattgtgccgattttaaaaacatcgttgatggattcgctccacagcgtgttttatacgggcctgatctttatcgcagtcggagccgtattcaccttgttcttaaaacctatcaagctatcaaataagaaagcggaagaccaacaagaaaaagagaaggcggcaaaagccgttgaatcaccttcccattaatagagcaccccgcgggtatcaatccgcggggttttttattcaatcatctgggctcttccatttccgaaagaccaatcctcagcctgatttccggccagcatgataaacacatcttcttttcttacaccaagctcggaatgaatccggctcgcgattgagcggtaaagtgcttttttctgttcagttgttcttgactgtttcagtgtaaaatgaatgtatatcagttcatcagtacgctcgacttggagataaaatggatcataaaaaaattcgcttttttcatattgtctgatgacttggaaatagtcatcttccggcacattgatttcttcaatcatcgattggtggatagtcctgctcagtttttgaagccacacttcgcttcttcccgaccgtaaatgaatctgtacaaatggcatctccccgcatccctttctttacagcgtctgtccgctgtcaattgtgataatttggcctgtgagtgattcctgttcaattagtgaacaaatcaatttggcaacatcatctggttcagcaatacactgcagcggcaaagagccgatcatgcttttcattttttcttcccgtccggcccaccatctcgttgccacagctcctggtgctacaccgctcactctgatttcaggcgctaaggcgtgggccaatgatttcgttaaaccgtgcaccgctgattttgatactgcgtaaggcatagatgagccgacaccagttatccctgcgatgctgccgacgtttacgatcgccccggccttgcttttcttcatgaacggtaccactgctctcgcgcaaaaaaacatccctttcacattgacggcatacagctcatcccagacgtcttctgtcgcagcctcaagatcatccattggaatatgccgtgtaatgcttgcattgttgactaaaatatcaaccgtgccgtgtgtgctcacgattgcttgaatcatatcctgcacgtcgctgtttttggatacatctgcttggatggcgaaggcttgcccgccagctttttgaatcttttccactgtttcctccgcttctgattgcgagcgtgaataattcaccgccacaatcgtcccgcgctttgccaattccatactggctgcttttccgattcctgtgccgccccccgttacgagagctattttgttcaagacattcattgccgccactccttgctgttgactaaagtatatttctgattccattgtaatccagctttgatgttacgtataatgattgttaaagatactagatatcactcagattgatagtaaacgaacggaggagttcaaaatggaaagcggagatttacgtgtgtttcaaatggtagctcgtgaagggagcattacgaaagcagccctgcagcttggctatgtacaatcgaatgtcacggccagaattcaacaattggaagctgagctgggtaccacactgtttttgcgccataatcggggcatgacactttctgcaagcggaaaattgctgctggactacgcaaataaaattataggccttcttgatgaagcgtctaaagcgctctcatcctccgcagaaccaagcgggccgcttatgatcggctccactcagacaaccgccgcggtaaggcttccaaagcttctggcatcttattatgaagaacatccaaacgtccagctgtctttaacaacaggacatacgcaatttctccttgataaagttcttcgttatgaattggatggcgcgtttatcggatgcgaatgccatcatcctgagctcgaatcctatcctgcgtttgaggaagaaccagtagttgtttcggctgcctccgtgcccgatgttgaggaagccatcacaaagccgattctcgtttacagcacaggctgttcgtatcgagaaacacttgaaaaatggctgcgctccgtcggtgtcacacagccggtcattatggaatttgggacgcttgaagcaattatcggcggggttacagcaggtcttggcatctcgttgctgccaagaacggttgtgcagaaacatgaagcagaaggatcaattcgattgtacccgctgcctgaagcgctcagccagatgaaaacagagtttattgttcgaaaagattcgtttatcagcagcgcgctgagaacctttatggattcctttacgccagataaaacggctgaatcacaaaaaagcagtctgctataatgtacagactgctttttggctattgtttgtttcgatgcgcttcatttaattccttaatatgctgaatgatctctttaatgccctgctttgcgtcggggtatgtcgcattccaatgcttagcgagcggtggcatgctcttggctatatgcgtgtacaaaatccattgcttcacttcttcttttagctcatcgtttgtctcaccaagcagaagctcagtatacttctccagcaatccatccagctgctcctgaagtttttgttccatttgccatcttcctttcgaaaaaacagcaaggagctttctcaattgaaagctccttcgctgcgttatttatccatgtgatgtgaaagccgcttcctggacaatgcatctgcccctgccatgaggaatgcaaagaggcgttccgaagagcgggtcctgtgtaacctgacagttcatagaaaacacattttgcacaagatcacaagtgatgacctcttccggacggccttctgcataaatccgtttatcttttatggccacaagatgatgcgcatagcggcacgccaagtttaagtcatggagaaccataacaatcgtccggccttccttttcattcagctcaaacagcaaatcaagaatttcaatttgatgcgtcatgtctaaatacgtcgtcggctcgtcaagaaggatgatatccgtttcctgggcaagcgtcatcgcaatccaagcccgctggcgctgtccgcctgacaaagaatcaacggcgcggtcagccatgtcctcaagctttgttgctttaagcgctctttcaactgcttcctcatcctcttttgaccactgcttcagccagttttggtaaggatatcttccttgcttcaccagctgatgcaccgtcagcccctcaggagccgaaggaccttggggcaggattgcgagctcttttgcgacttccttcgtcggaagcttggcaatcgctcttccttccagcagcactgaaccgcctctcggcttcatcaggcgcgctaatgaacgtaaaagtgtcgattttccgcagccattgctgccaataaatacggtaatttcacctttgggaattgttaaattcaactcatcaataataacggcatccccgtatcctaagctcagcgtttctgtagaaattgcactcatacccataaccgctcctttttgctggctttttagcagcactatgtattgcacgttttctatatacatgcttttaagtcaattatcatcaatgcaagtgattccgatattcagccatttgatatggtcatatatccctcattgtagcagaaaacactgactttgaaaatcattttcaattagttttatggacataattgacgtttatgggttttttatcacaagattacttcttgatttctctgatggagccgtccttcagcttcaattttaaatcgatatgatcataatgactgtccagattaaatgctgccagcacactgtgtatcacttctgtttcagccatttggtctgtcacggaaagctcgctcaaaatcattttcatctcatccaatgcttcttctccctcctgattgacaccggagagcttatcctgtatttccgctttttcctgagttccgttctttgtatagattccttcataacggttatgctcaccatccccgtagctcacacgaagcgaaaaattactgtagggaacggacttcagctgggtgacggctgtattttctccttctgcctgctgctggtcttcattgagacggcagcccgcaatcagaaccactgcgagacatacagccccggctgctctgaccaaatgcatatgtttcccccctgtaggattccatttattttaggtatatccagagaatgaaatcctcattcagagaagaattgaaaaagccggggcatttaacgccacggctttttctttaagattcggtcatttgtaaaaaggtttcggcgtcacgcacagccagcttgatggcattctcccagaaatcgcgctttgtgatgtcagcgcccaaatgcttcatcgccaaatcctccactgtcatagaagccgtatcgcgcaatagcgccatatacttctcttcgaatgtgtctttttcttcaagcgccaacgcgtaaataccaagagaaaacaggtagccgaatgtataagggaaattgtaaaacggcaccctcgtgatgtgaaaatgaagctttgatgcccaaaaaagcggatgatattcttctaacgcattgcagtatgcctctctttgcgcctcttccatcagctcattcaagcggctggccggtaccactccccgctttcgttcctcgtagaatctcgtttcaaatagaaatcttgcgtgaatgttcatgaagaacgcaacgcttctttgcactttatcctccagaagaacaagcttttcttccctcgtctcggcctgctggacagtcgcgtccgccactatcatctctgcaaacgttgaagctgtttctgcaacgttcatggcgtaggaacggtttaacggcctgacgttgagcattgcttcctgatggaacgcgtgcccgagttcatgcgcaagggtagagacatttgaggcgcttcccgaaaatgtcatgaaaatccgggattccccgctgtccggaaaactggtgcaaaagccgccgactctttttccgctcctgtcttccgcctcaatccagccgtcccgaaacgctttttcagtgaatgaggacagctttttgccaaacgttgaaaactggctggtaatgatatttgcggcttcatcatacgaatagacctttccgtcagaaccgatcggtgcctcgacatcgtaccagctgagtttttcaaggccgagcatggatgctttccggttcaaaaactgaacgaacggcttcttgttttcagtgatgacctgccacatcgtatcaagtgtttcttttttcatcctgttaatttgcagcggttccttcaggacattctcccagccgcgcgctttataggtttcaagccggaatcccgccaaatgattcagcgtgctgctgaaaatatcttgcttgctctcccaagcttggcggaaacgttcatatactgtttttctgacagtacggtcttgatgatccatcatattctccgcctgaccgacagacaattgcttgttttcaccgttttcctcatacgggatcgtcattttcccgacaaccatattgtataagtcactccaagcgtgatatccgtccaccgcaaggtttccgatcagtttttccttaccggggctaagcttttcggcaaccctctgtcttctttcatttaatatgtaagaaacatcgcgcaatcccggttttgttaacaattcattccacacgtcttgattaatgtccacaagtttatgatctaatgtaacgagcgacgattgaaaatctgcggaaagccgattcatgagtgcctgatgctctatagccttttgatcattgatattctgggcctggaggcaagcaacaaaagcgccggcctgctgaagcttgacggatgtctgttcgaataaatcaagcaacgcggtcagcccttcagcctcttcaggcgattcaggcacctgaaacgcatcagtcctgtcttgaaatgcacgcagactttgtgacagcttctcaatataacctttgaattcttccgattggctcccgcccttaaaaaatgaatcaagatcccatctttggcctaccccttgcagcgccatatcacaaaacccctttccttctttcgttctattatagaacaattctgaattattgtataaaaatttctattacaggcgtcatttcgtgttcaggatagtacaatagctgtagcagtttaataggagggttaggatgaataaaaaaatagccatcgtaacaggagcgtccagcggcttcggtctgctggcagctgtaaagcttgcccgatcatttttcgtgatagccacatcaagacagcctgaaaaagcggaacagcttcgagaattggctgcagcacacaatgtgtctgattctattcacattacagctctcgatgtcaccgatgaacaatctatagtctcattcggaaaagctgttagtgcttacgccccgatcgatttactcgttaacaacgccggaacggcttatggaggatttatcgaggatgtgccgatggaacatttcagacaacaatttgaaacgaatgtcttcggtgtgatccatgtgacaaaaaccgtgctgccttacataagaaagcatggcggcgcaaagattataaacgtgagcagcatcagcggactgacaggattcccagcgctgtcgccatatgtttcttccaagcatgcattggaaggtttttctgaaagcctgcgtatcgagctgcttccgttcggtatcgaaaccgctttgatcgagccgggctcatacaagacatcgatctggtcaacgtcattatcaaattttatgtcggtgcctgctgacgattcagcctatcatcaatactataaaaagatcctttcctatgttcaaaaaaacggagaagaaagcggagatccccaagaggttgccgacctcatttatcaattggcaacaaaacagcacataaagaatttgcgatacccgatcggaaagggcatcaagctcaccctgctgttccgatcgctttttccttggtctgcgtgggagtctatcctgaagaaaaagctattcagctgatctaaattataattattataatttagtattgatttttatttagtatatgatataattaagtcaacagatcacaaggaggacgttatcttatgaaaactgaaaacgcaaaaacaaatcaaacattagttgagaattcactgaacacacaattatcaaactggtttcttttatactctaagctccaccgtttccattggtatgtgaaagggcctcatttctttacattgcacgagaaatttgaagaactttatgaccatgcggctgaaacagtggataccatcgctgagcgcctgctggcgattggcggacagcctgttgccacagtgaaagaatacactgagcatgcatctatcacagacggcggaaacgaaacatcagcatcagaaatggtacaagcattggtaaacgactacaaacaaatcagcagcgaatctaaattcgtgatcggcctggctgaagaaaatcaagacaatgcgacagcggacttgtttgtcggattaattgaagaagttgaaaaacaagtgtggatgctttcctcttatttagggtaacaaaaaagctgaaccttaatcgggttcagctttttgttttttcttagcttgaactgctttctgtctgcttggtcagtgttgcgttcaacgttttcgtttttccctttcgcagcacttggattgttgttttatctccgacttttaagtctttgtaaaggatctgacggatatccgcactgctttccacgtctttaccgtttagtttgacaatgacatcctcagatttaatacctgctttttctgccggcgaatttgcttgaacttcttttacataaacacctttgcccaattgatctccaaacaggccgagcgtattttcctgataggtttcaggaacttgtgacatgtcaatcatctgcacgcctaaaaacggacggtccaccttcccgttttgcagcagctggtcaacaatcggctcgacatcattgcttgggatcgcaaatccaagtgattccacgccgctttcgctcaccttcaagctgttgatgccgatgacctggccgcttgcattgattaatgggcctccgctgttccccggattgatcgctgcatcagtttgcagcacgttcatttccaccgtcccttgtgttgtatccacatcaattgtccggttcaatccgctaatgatgccttgtgtcaccgtaccggaaaactgctgtccgagcgggttaccgatagcgattaccttttcgccagtgcgcagctgtgaagagtcaccaaagctcgccactttttttacattcttgccgctgatttccaaaactgccaaatcagtaatggtatcgctgccgacaagcttggcagtttccgtttctccgttgtatagcgtaacagtcagcttgttcgcgccttcaacgacatggttgtttgtaatgatatacgctttatcgctgtcttttttgaaaataacacctgacccggttccgctttcactttctgagctggagcctcctcccgtgccgaatgtgttattttgagaggtttggatatttgagattccgacaatcgtaggctctaaatcctctaccatatcagcgatgtttgatgcgttcgttatcggcgccgttgtaaaattatcagactgcacctgtttatttgcggaagcggattcggtcgcctgattttggtctgacggcagataaggcgcgatgccaagcatgaggcccccgccgataataccgcctaaaatcgggctcagccatgcggctctccgtttcttttcttttttcacagccgtttcttgcttttccatttctagtgcagaagccgtttcctgccgtcccgcttcatatgacacaggcgcgtcaagcaattcttgttcagaatgtccaatcagcttctggttttctgtattctgctgttctgtatgtgaaggttcagtttgatgttgatcgttttggccatcacgtcgataatccatgttcttacactcctttaacggttattcatttatcgttacatattcatcgcatgtacaagttcaattgtcccaataatgaggagaaaagcaaagcaccaaaatagaatatgtttgatcatcctacatcttcctcgctctttttctcttcctttcttcccttatacatatcataaacaaacattgtgggataaaaatgaaaagaatatgtgaaattatgaaaattgcctgccgtatgttaaaactagtttataatgacgttgaaaggatgtgaagagccttgtcatacaccatttatctagttgaagatgaggataacctgaatgaactgctgacgaagtatttagagaatgagggctggaacattacatcttttacgaaaggtgaagacgccagaaagaaaatgacaccgtctccccacctatggattctcgatatcatgctgccggataccgacggctatacattaataaaagaaatcaaggcgaaagatcctgacgtgccggtcatttttatttccgcccgagatgcggatattgacagagtgcttggcttagagcttggcagcaatgactacatttcaaagccgtttctgccgcgggagctgattatccgtgtgcaaaagctgctgcagctcgtatataaggaagctcctcctgtccaaaaaaatgaaattgccgtctcctcgtatcgggtcgctgaagacgcccgcgaggtctatgacgaaaacgggaatattatcaatttgacgtcaaaggaatttgatctgctgctattatttatccatcataaagggcatccatactctcgtgaggatatcctcctaaaagtgtggggacatgactacttcggaacagaccgggtcgttgatgatctcgtccggagactgcgcagaaagatgcctgaattgaaggtggagacgatttacggtttcggctacaggatgatgtcatcatgaaaaacaagccgctcgcgtttcagatatgggttgtcatatccggcatcctgttagcgatatcgattttactgcttgtgttattttcaaacacgctgcgagattttttcactaatgaaacgtatacgacgattgaaaatgagcagcatgtgctgacagagtaccgcctgccgggttcgattgaaaggcgctattacagcgaggaagcgacggcgccgacaactgtccgctccgtacagcacgtgctccttcctgaaaatgaagaggcttcttcagacaaggatttaagcattctgtcatcttcatttatccacaaggtgtacaagctggctgataagcaggaagctaagaagaaacgttacagcgccgacgtcaatggagagaaagtgttttttgtcattaaaaagggactttccgtcaatggacaatcagcgatgatgctctcttacgcgcttgattcttatcgggacgatttggcctataccttgttcaaacagcttctgtttattatagctgtcgtcattttattaagctggattccggctatttggcttgcaaagtatttatcaaggcctcttgtatcatttgaaaaacacgtcaaacggatttctgaacaggattgggatgacccagtaaaagtggatcggaaagatgaaatcggcaaattgggccataccatcgaagagatgcgccaaaagcttgtgcaaaaggatgaaacagaaagaactctattgcaaaatatctctcatgatttaaaaacgccggtcatggtcatcagaggctatacacaatcaattaaagacgggatttttcctaaaggagaccttgaaaacactgtagatgttattgaatgcgaagctcttaagctggagaaaaaaataaaggatttattatatttaacgaagctggattatttagcgaagcaaaaagtgcagcacgacatgttcagtattgtggaagtgacagaagaagtcatcgaacgattgaagtgggcgcggaaagaactatcgtgggaaattgatgtagaagaggatattttgatgccgggcgatccggagcaatggaacaaactcctcgaaaacattttggaaaatcaaatccgctatgctgagacaaaaatagaaatcagcatgaaacaagatgatcgaaatatcgtgatcaccattaaaaatgacggtccgcatattgaagatgagatgctctccagcctctatgagccttttaataaagggaagaaaggcgaattcggcattggtctaagcatcgtaaaacgaattttaactcttcataaggcatctatctcaattgaaaatgacaaaacgggtgtaacgtaccgcatagcagtgccaaaatagactgtagatgttttgcagtctatttttttatgtgaaagaatagccgttaaaatctctgtaatttgttttgagcggctgtttgcattgatgaacccattttttctctgacaaggtctgcttcggatatttgactttctccactttgattcctctgtttcgcaagcggctgatcatttcgtccaattctctcattctagattcaccctttcgcttgagctttgaccattcggtcatctcaatttataatataaataatacatgataaaaaaacaagttacaataaggttaattttataacagacggtgtgactatatggtcatatcctagcaggcctccgggctccgaaagggtggaaccattgaaggaaaaagaaaaactgattattgaaacagccttaaaactatttgcccaaaaaggatacaactcaacatcagtccaggaaatcgcaaaagaatgcaaaatatctaaaggcgctttttatatttattttccttcgaaagaagcgcttcttctctctatgctgaactactattatgataaaacgtttacccgaattttaaatattaaaacgaagggcgacagccccagaacggcttaccgtaaacagctgaccgtcctctatgaaaacattcttgaacacaaagattttatcagcatgcagttgaaggagggttctctgccttacacagaagaagtggagcaatgcgcaaaaaaaatccgccagtcctcacttcaatttcatatcgacagcctgctgaacatctatggaaaaaaagcggaaccctacactgctgagctttgttttttaatagagggcatcagccagatttacctggaatgcatgattttgctcgggtacactgtgaagccgtctcaattagctgatatcattatgaatcgaattgatgatatggtaaaaggcatgtctgaacgaaacgataagcctttcatcacattggaagaggcgagctctttattcgggcctcttacgcacggacggcctgacccgctgactgaatcaattgtgaaaagcctacgtgacaaaattaacagcttaaacacaaactcctctcttgaattatcggagagcttggacatacttgaagcagaaatgaagaaaaaaacaccgaagcttgcgatcataaaaggaatgattcataatctgacggagtctgaagctctcgccaaagatgcggaacagcttaaatatttattaaaacagcaacatatttagaagaacggctgcttaaaaagcagccgttctttcttcctattacgcctttggttttaccatgtcttccggcttaaccatttcgttaaattgctcctctgtcagcaattcaagcttcaaagctgcttctttgagcgtcaatccctctttatgggcaagcttggcgattttcgccgcgttttcataaccgatatgcgggttcagcgccgtaacaagcattaatgaatttgacaggttttcctgaatggtttctttattaggctcaataccgacagcacatttatcatggaatgaattcatgccgtcactgagcagctgcacagattgcaggaagttgtaaataataacaggcttaaacacgttcagttcaaagttcccctgacttgccgcaaagccgattgtcgcatcgttccccatgatttgcgctgcgatcattgttaacgcttcgctttgtgtcgggttgactttaccaggcataatagagcttcccggctcattttcaggaatgacgatctccccgatgccgcagcggggtccgcttgcgagccatctgacatcgttcgcgattttcattaagtcagccgcaagcgcttttaatgcgccatgcgcataagtgatttcgtcatggcttgtcagcgcgtggaatttattcggcgagctgctgaacgtttggccggtcagcttagtgatctcttctgagacaagctctccaaactctgggtgagcgttgatacccgttccgacagccgttccaccaattgcaagcgcacgcattttatctgtcgcttccaaaatcatttccttcgaacggtccagcatgtgaacccatccgctgatttcctgtccgagggtcagtggcgtagcatcctgaagatgcgtgcgtccgattttgacaatatcattgtatgcttttgctttttcatccagtgtattgcgaagctgatcaagcgccggcacaagctgctcgtaaacagccaaaacagcggcaacatgcatcgcagtcgggaatgtgtcgtttgagctttggcttcggttcacgtcatcatttggatgaatcgtttgatcagagttcttctcttttaataaagcagtcgcacggttggctaccacttcgttcatgttcatattgctttgtgtgccgcttccggtctgccatacgacaagcgggaagttgtcatcgtacttgcctttgagcacatcatcacaaaccgctgcaatcgcttctgctttttcagcgtccagattgccgaggcgtttattagctagagcagtgcttcgttttaaaattgcaaacgccttcacaacacgcatcggcattttttcagaaccgatcttaaagttctccttgcttcgctgtgtttgggcaccccaaaatttatcagcaggaacttttacttctcccatggtgtctcgttcaattctgtattccatttatgtatccctccataacggttgcttcaatagatcataattcgccaatgacacaaaaaatcctttttatttttcgatcttggcagattttaattttaattcaagatatacgcgggaatcctttgaatatttgtattttggatttgtcctgccgtactcctttgatgtataagagacatcataatgctgttcaaatgatctaatgagctgttcaatttcttcttgttttccagctagccttacctgtgccacttcgtatcctccgctttcataaaaaaacttactccatgaaatactctaacacagtatatcatttttttaacaggaaaagataacctctactaaggttttggataagaggtgacctcattggaacaaacagagtttaaggaatatatacacgataatttagcattggtgctgccaaaattaaaagaaaacgatgatctggtgaaaaacaaaaaaatgcttgcgaacggactggttttttactatctctatttcagtgaaatgactgatgagaataaggtgtcagaagccattaaaactttgattaaagatgaggagaccttaacgcttgaccaggtcaaaaaacgccttgaccagcttgacgcaagacctgttgaaactgcaaaaaaaacgattgaatcgattctcaacggcaattgtgctgtgtttatcaacggattggataaagcctatattctgaccacaggaaagaaaaaaacaagaagcctgacagagccgacaactgaaaaagtggttcgcggcccaaaagtagcgtttgtagaggatattgatacaaatctcgctctgatcagacaaagaacctctcatccgaaattgatcaccaaaaaaatcatgatcggcgaaaacaagctgaagcctgcagccattatgtacattgaaggcaaagcaaaaaagtccgtcataaaagaagtgaaggcgcggcttaaaaatatccagctggaagatatccaggacagcggaacgctcgaggagctcattgaagataataaatattcaccatttccgcagatacaaaatacggaaagacctgacaaagtatcttcagccctgtttaacggccgtgtggcaattttggtcgacagttcaccatttgtgctgctggtgccggtttctctcggcatcctgatgcaatccccggatgactactatgaacgctggatttcagcatctcttatccggtcgctgcgctttgcttctatctttatcaccttgtttttgtcatcgatttatatagcacttgtttccttccatcaggggctgctgccgaccgcactcgccgtcacgatttcggcgaacagggaaaacgtgccgttccctccgatatttgaagccctgctgatggaagtaaccatcgagctgctaagggaagccggactgcgactccccaatccgctcggacagacgatcggcctcgttgggggcgtagtcatcggacaggctgctgtagaagcgaatctcgtcagttcgattatggtcattgtcgtcagtgtcattgccctggcatcctttaccgttcctcaatacggaatgggtctgtctttccgggtgctgcgttttatttcgatgttttccgccgctattttagggctatacggcattattttatttatgcttgtcgtttatacgcacttaacgagacaaacgagctttgggtctccgtatttttcgccaaacggattctttagcctgaaaaatacggatgactccattatccgtctcccaattaaaaacaaaccaaaagaggtgaataatccaaatgagccaaaaacagactccactgaaacttaatacctttcaaggtatttctattgttgcaaatacaatgcttggggccggacttttaacattgccgcgagcgctgaccactaaggctaatacgcctgacggctggatcacgctgatattagaaggtttcatttttattttcttcatttatttaaacacgctcattcagaaaaaacatcaatacccttcactctttgaatatttgaaggaagggcttgggaaatggatcggcagcatcatcggccttttaatctgcggctatttcctcggcgtagccagcttcgagacacgggcaatggctgaaatggtgaagtttttcctgctggagagaaccccaattcaagtcattattttaacgtttatttgctgcggcatttatttaatggttgggggcttaagcgatgtgtcgcggctgtttcccttttatttaacggtaaccattattattttgctgattgtgttcgggatcagttttaaaatttttgatatcaataatttgcgtcctgttttaggcgaaggccttggacccattgcaaactcccttaccgtcgtttccatctcttttttaggaatggaagtgatgctgtttcttcctgaacatatgaagaaaaagaaatacacgttcagatatgcgtctctaggatttctgattccgattatcttatatatccttacgtatattatcgttgtcggagctttgaccgctcccgaggtgaaaacgctgatttggccgactatttctctctttcagtcctttgagcttaaaggcatatttattgaacggtttgaatcctttttactggtggtctggattatccagtttttcaccacatttgtcatttacggatactttgccgctaacgggctaaagaagacatttggattatcgactaaaacaagcatggtgattatcggcataacggtcttttatttttctctctggccggatgacgccaatcaagtcatgatgtatagcgattatcttggctatatttttgtctccctgtttctgcttccgttcattctctttttcattgtagctctcaagaggaggattacaacaaaatgaaaatccggattttatgtatgtttatatgcaccctattgctgtccggatgctgggacagtgagaatatcgaggaattaagcttagtgatcggagtagggctagacaagcctgacgatgaaaatttagagctgacacagcaaattctcgtgccgaaaataatcagcgccaaggagggctcttcatctgatccgacacagctttctatcacaaagggtaaaactgtccatcaaatgatgagaacctctgcattaaagcataagcctacgttttcacagcatttgcgtctcattctgctttccaaaagcgtgattgcggatcaaattggaatggacgccattattaaccagtttgtcagagacaacggaacaaggaggagttcctacgtctttatcaccaacggccgaactaaggatatatttaacatgaatgatgaaggcgaacccgcatccaacgtgatatatgatctgacagagaataataaggtgacgatcagaacgatggagccagttacattgggggagatctcagaacacttaacctctgacgattcattcctcatccctcatgtcggtaaggaaaacggcaagctcgcgataaacggagcctctatcataaaaaataaattatggcaccgggacctcaccccgattgaggttcaaaatatcagcttattttcaggcactgtcgagggaggcgtcattgacttgaagcgcgatggccatctcttttcttatgaagtatattcaagcaatcggaagatcaagacggcatacaaggacggaaagttcaaattcaccgtcacccgcaatattgaaggtcgtctatctgaggactggaatcccaatgaagactcgtttaaggattcatatattaaaagtattgaaaagacagtcgaaaaacgagtacacgaaacagtaacgtcatttattacagagaagctgcagaaagagatcaaagcggacgtaaccgggctgggaaacgaggtcagaattcattatcctcaaaagtggaaaaagatttcaagaaaatgggatgatgattatttcagcaatgcggaaatagactaccgggtcaatgtgattgtcagagacttcggaacgaaaggcgcaaacaaatagcagccgcctaattcacgagatgatttcggtgcgcgtacaccgccgcctgcgtccggtcactgacatccagctttgataaaatattcgtaatatgtgttttgactgttttaatcgtaataaacagttcctcgcctatttctttgtttgtctttccttctgcgatcaggcagagtatttcgagctcccgttttgtaagcgattcatgcgggagcgcgttttcacctgagtggcgcagcctggataatacttttcccgccacttttgactccagcttcggctctcccttgcttgcggcgcggatggcatcggcgatttctgccgcttttgaggttttcaacagatagctgagcgcgccagcttcaataaccgggtacactttgtcatcatcaatgaagctagtgagcacaataattttcgggtcggaaagctcccggcaaatttgctttgtagcttcaatgccatccatgccctccatgacaaggtccattaaaatgacatcaggcgacagttccacagcaagccgaacaccttcgctgccgtccgatgcttcgccgatgacttcaatatcgggctgcgcctccaaaaaagccgcgagccccattctgaccatttcatgatcatcaatcaataatactcgaatcacgttcgttctctcctttttcttccggaaaaatcgggaccttcacttcgatttgagtgccttttccttctactgaaatcacttcggcgacaccgccgatttcacttgcacgttctttcatagaattcaagccgtatgaggaggctttcacctggtccattttaaagccttttccattatcaatcaccttcagacggagctggctgttctttatgcccagaatcacggttacttttgacgcttttgaatgtctaaatacgtttgaaagggcctcctgcacgattctgaacaagtggtcttcaacacccttggatatcgctgtgtcctgtatatcccactcaatatcaatcggctgcttttttcggaactcgtccaaaagctccgtaaggccctccttcagcccttttccttcaagggtaacaggccgtaaatggagcagcagcgccctcatctcattttgggcttcgcctgccatatgctcgaccatcttgatccgcttgactgttttgtcatcagcatccttgacatgttccagcacggctgatgtcatcatcgatatggcaaagagctgctggctgaccgcatcatgaagatctctagccaatcgctggcgttcttctgagataaccgacttcttcatttgagcctgccattccgcacgttcattggaaagtttctgcagggatgcgacttgaagctccacgcgcttcgccatttcgttcagctgatcagcggccaggccgatttcatcatcaccgagcggaggtatccgataagcgaaattgccgttttcaaaggttaaaatggattcaattaatgtatcaatccttgtcttcaaccggttgccgtacatataccctgaggcgaaaccgactgtcacgctgatcagaagcaaaatcaggataaacggaattccgaaccagcttgatgacagcaaaacaagcggatcgagccgatagtaaaacatcataaaggaaatcaggcaggcaaaaaggagcaggctgattcccgttgtcatgcggatggcgcgccattggaggctggcaagcattttttttctcatacgtacttcacatccacatcaccgataaataaggaaacggacacttttacccggcgctttgactcgctgaaatcagttgacgcggcatataccttcgtgcttaatccgcttttcttcgagccgatcagattaatgtcacctataaaaacagctgagctgacagccacttcaaggtccgatggtacataaatatcaacgttaccaatgactccgctaatgacgattgtactttctccctcgggaatcattgctttagataaatcgattttgatatcaccgataaaaccagagacatttaaatcattcaggtcaaacggctgcttcatcatttgcagctcaccgataaaaaagctgcgcatgtcgggatgttttacatcttttggcggatcatgatgttcttttttattgagattgacctgtttctcattcggttcaaatatcggcttccctttgataagcctgtagccggcgtaaatcagaaatgcggcaaacgcatagccgaataaattaaaggtgatgctgaagaggtttttcaaaaatagaaacgcggcaaagatatacatgacggagccaagccaatcacgggaatattttttaaggaaatagccggcaatcagaaaaaagagcggccaaaacagcagatcgcctattccgataatttgcaaaaacatactgatgccgaataaagcaatgatcaatccgagaagctgtttttttgtcattcctggtgtccgcctcctttcttctgcctagtgctaccgtatcgctagatccccgctgtccgttttgatgtcgattggatgctggccgcttccttgcgtgcctgtgatgtgatgctgttctttatgtgctttatcagcaaatgaatacggcgaactgacgtcaccgcttgctgataaagcattgactgcaaagctgccgttttggggaaggcttacattagcatcaccgcttgtcagcgtgacagatacgggaccggttacctttttcaatacagcattaaaatctcctgaagtcattttcacatcaagagagcctgatacatgaaccagatttgcgtcccctgaagctaaatcaatgccggctgttttggagacggtatttgaaatggaaacatcccccgatgatgccttcactttcagatcttgaatgcggacgtccgtcacgctcgtatttccgctcgcagatactgcgttcagcccggaaagcgcaagatggtcattcccggccacagacacgtcaccgcttgaggttcgtactgccagatcacctttataatcatacggaagcctgacgataagagttgaacggttaaatccattcaaaaattgaaattctttttcctttacggtcagctccagttttcttctgttttcagtaacaaataactttcctgagtctcctgaaatgcctgccgatatgtcacttcgttcttccgctataatccggacatccttgctatccgactcaatgaccatgctgtcaatgtcccgcggcgatgcgctggctgaatcagcttctgtgccatttatgaaacccaggcctgcagcaaacacatcttttacgacaacagcgaaaaaaaccagaataccggcagtgatcaacagtttgccaagcatttttttcattcggtttcatccttctcattcattctattataaaggaaaagcttgcgaattgatacgtgcggaaggggaaggacttgaccgcaaatccttccccgttccgcttattcatttgccgcttgtgtctggtctgatttttgcagtgaaagtgtccgcattttttcaatctccgcttctacatcgtctgcgaattctttacgtgtaagttctgtgccggcttccgctgactttgaataattcgcgcggatttccatttcttcaatacgattttcaatacgcaaaaattcacgatacgcgctttcactgtcaattttgtcaaatgtggtattcatatgctctttagctttcgccgcatttgcccgcgcaatcagcgcctgttttttatcctttacgtcctgaagctttgtttcaagtgcagccagttgctctttcagatcggccagctgactgtttgcctgttcataggaagctttatgctcagccgcctttccttctaaatacttcatttcagtcagcgcctttttcgccagttcttcttcacctgcgtcaaatgcgagctgtgcctgatttttccgttttccagccacttcagcggcttcttcatattttttcttaaattgataggcaatggtgtgctgtttcacaattgtttgctttgcttttgcgatgtcgctttccatatcgcgtacatattgattcagcatcacctttggattctccattttatcaagtccttcatgaactgacgcaacaaacatatctctgattctttttaataccatacctaattcctcctaatatattgatattattttttcttcaaaaattcttcccattcatcatcaaagtgagattggtaggcagcagaagccggttcaggatcaaaagatgatacaccgttatcagctgatccgtttttcatcagcttccagccgtaatacaccatagcggccgccaatgcgattccgacgacaaacggaagtgagcagatgagcataatggctccgataccgcccacgatgattcccgtgatggtttttcccgcggcaaaccttttgactcctgcgtatgtcatcaagctcccgatggcgagcgggatgataaagccgaagcttcctcctccaaaaaagacggatatcccaaatacaattaataagaatccgcctatagttttcttgttgatcttcatgcagatcctcctttcgttttccttgtcttcatcttatacaagttagaagatatgcaaaacgaatcagagattgatttttatataagaccggagtcgtatctcggacaggacccatcggcacaaaaaaacgccatgcacgaggcatggcgttttaaaaccctttacagatgaacacttgcttccctttctttaatcaggtcggacctttctgctttggccagttttgtaaacagcaagattccgatacccgcaataatttcgacaatcccgccggcagcaatcactgttcctgagccgaaagcattagcggcatacccgcaaatgacagctccggcagggatcgaaatatttgagatcatatgtataacggcgtaaacctgcggctgatcctcactatccacagacgtctggataatcgtgtactcaggaacattaacagcactgactgcggcaccaaaggtaaaagcagcgaaaaagacgagcggcaaaaaggtattcatccctgtaataaagaaagcaaatccttcaataatgccggcagtgacgaataacaagccgtacctgtttaccttgactttcgccagcacaaaccctaataaaaacgcgcccgcggcggtggtggcctttaaaagcgagtatacgatcggctggccgtttaaatcttccgcaacgtatacggcagagagcgcttcccatggggcagccgcgaaattcataaagatacagtaaatggcgagcggatataaaatctggtgttttctgacgagcctaaagccgcgtttcagtcttccgatatatgtgcctctctgtgtaacaaccgcagactctgattgagattcaaccgcagtgtacttaataaaaagaacgagaaaacctgacaccaaatagagcacaagtgcgataagcatggtataagaaggactaataaatgtaagaaaagcgccgcataatgtgacagccccaagccggacaatttgagcggaggattgcagcacagcgtttgctttttgaatgccctgttcattgacgatttgaggaatcaaagcgatagaggcgggattgtaggcagctccagtagctgaatgcacaatcataagcgtcatgacaaaccacagcggagagaagcccgcaaaatgacatagagggataatcaaaacaatcgccgcccttgtcagatctgaaaagtacatccaaaatttcagcgtggtctgtttcataaaaggccccgtcacaggcgccagaacggcttccggcaaaaacgtgacagcaatcaataaagcagtgccgatcgcacctttgccgtcataaattaaaaaccataatattgaattaaatgcgaacatatcgccggatatcttgactattcttgagaaaaacagataattgaaatttctcttccagatgctatcactttcaattaaattcaccatccatcagagccccccgttgcctattttttacatctatttattacaatatctcatttttccatttttcagtcaataattcataaggttcattttttgtcgtaaaatgggaaattgacagagtgaaaaacaaaaaaagccggcatgtatttgaacacgccggcttccttttcactttttatgattcgctgctgtttcggtcccgaaacacaatggcacttctttcatattctacatcgccaataccgcttcttgcattcacaacccgtgcggcggcaaagaaataatcggacagacgattgagataacgcagcactgtttcatgaatctcctccgatttcatcagcgccaccactcttcgttctgccctccttgtaatggtgcgggcgatatggagaagcgaagcacctcttgatccgcctggaagaataaatttcttcagttccggcgcttctgctgtataggcatcaatgcgcgtttctaaaaaggaaacagattcttccgttagtttgtagtcttttctttctgtgacgattgccagatcgcctccgcagtcaaacagctcatgctggatggtcagcagctcggctgtcagatcttcaaagccgggctgcccggaaagctctgccaaagcaagcccgataaagctgttaagctcgtcaatcgtgccgtagctttcgacgcgtaggctgtccttgtccgttctgcccccgactaagcccgtttgtcccttatcgcctgtttttgtatatagtttcataccctgaatctcctttacagacttattcaaacaactcagcagcctcttttacacattcagctgtccctttctttatcaattgattcagccgctgttctatgttttcggattgctgagtttgagtcgcggcgatgagaatatcacctgtgcctcctccgtctcccagcactttcgtccgttctgcttcggcagccataagagctttgatgaagaattgatctgccgcatagccgtttatcaaaatccaaatcgaaaagccggtctgaacgcatatgaaaacggataactctctgtcttcatacgttcgatacacgaaacggtcaagtctttctgaagaagccatcgcacacgtctcctgcagttgaaaaccgctttctgaaagacaggccgtaagtccttctatcggatctggctgatctggcagccgtttatggatcagcgtcctgctccacgaaaaccctgcaccgataggcgtcgaggacaatgttcgaagcgggatttccgtttgcagaagaatgtcatcacgccccgcttggagcaatgcttcaaatgggatagactgccgcttcacgctatctttttcaggctgaatcacaatcatcggtttaggtgagctttgatgaaccaaggcggtgacatctgtatcgtacaccgcctttatgctttgttctgtaacagcatattccggtttttgcttaggcccggcggtaccgtttttcataaacatgagcccatcacagtacaggcttgcggtgttcagatcatgaaaaacgctgacagctgccaatccgctttctctcgtcaggcgtttgatcagatcaagcaggtctttttgataagccagatcgagaaaattagtcggctcgtccaaaaataaaatacgcggctgctgcgccaaagcttgtgccaaatacacccgctgctgttcccctccgcttagttcgcgaatcggcttttgcgcaaaatcggccactcctgtttgctccattgcttcctgtacaatggcttcacccttttcagtctgctgtctgaacagccccgtttggaatggatatctgccaaaggctacagtttcttcgacagtaaaggtgaaggcttgatccattttttgcggcaggacagccatgatttgcgccagttccttcggtttatagtccgccagcagttttccggccagataaaccctgcctttcttggccggcagcgtacctgtcagcaagtgcaaaagcgtggtttttccgcttccattagggccgagaattccaagaaattctcccttctccactgttaagctgacattgttgattaggcggctgtcgccgtatcctcccgacagcccttctgccttcatcataagcttctccccccgcgatgctgccgaattaaaataagagcgaacacaggcgctcccgccaaggacgtaatgatcccgatcggcagttcaatcggctcaatgatggttctggaaagcagatcggctaaaacaagaaaccctgccccaagcaaggcggacaacggcagtaaatgccgatggtccgttccccacaaaagccttgtgatatgcggaatcacaaggccgacaaagccaatcgtacccgatactgccacagcgcttcccgtcaaaagagatccggctattaaaatcatcatcttcctctgctgaacgctgactccaagaagctttgctttatcttctccatatgtcatcacgttcagttcccttccgtttataatcaataaaatggttcccaaaagaaaaaacgggagaaacaaaataacatagctccagcccctcattgagacgctgccaagcagccaatgcacaatcggaagcaggttgtctcctgtcaaggcgatgataagagaaataaatgcgcctaaaaaagagttggtgatgacaccggtcaaaatgagggtggaaacagacatcgaagcatgaacgaggcggctgaagaaaaggaccgccgccatcgtggccagtgccgcggctacactcaaaaccgggagtgtaaaccctccgatgacaggaaggtgcaaacctaagaacagagtcacaacagctccgactgaagcaccggatgacacacctagcgtatagggatcagcaagcggatttttcaacaatccttgaaaagcggcccctgcaatagaaagagccgcccccacaagggcggccagcacaactctcggcagtctgatattcatcataatattagtgtacatcggatcatcagaaccgatagagccgccgaaaccttgatgccaaaagacacgaaaaacagcgggaataggaatatgcaggctgccgcaagaaattcctaagatgatgctcacggctaaaaatgagaaaccaatgatatatgcggcataacgattattccttaaacgtatccgggtaaatgctttccgcaagttcttcgaccccttcgatcagacggggaccggaacgtgtcacaagatcagggtccacatcatatacacgatgatgtttcacagcattgatttcgctccagccatcgcgtttttccacagctttcgctttcacaccgtccgttgtaacaattgcatcaggattgagttttacgatcgcctcgtctgtcatttgcacccatcctgtctgatccgcagctgcgtttttagcatggatgacatttagcatttcattcataaacgtatcttttccggttgtataaatgtcaggatcaggagaaacctcgataaatacgcttttctcctcgtcttttgaaatggttttcgctttttcttgaatatcctttagatctgatttcatgcttttcacgagctgatcggcttttttctccgccccgccagcttctccgatcatttcgattgatttgtacacctcggagaatgattgtgcatcattgacagtcagcactgtaatgcccgcgtccttcagctgtttgatggcatccgctgatgctgacatggaagactcatgggccagaacgagatctggttttagagaaatgactttttcaacgtttacattcatatctccgactttctcaacctttttgacttcctttggataggtatcgtttgtggtgacaccgaccactttgtcaccaaggccgagtgcgtatgtaatttctgtgttgctcggcattaatgaaacaatcttttttggctcttttttgatggttacatcttggtttgacgcatcatcaatggtgacagggaacacttctgttttttgttttgcctttgaatccttctgatccgcaggattgccgcagcctgccagcataacagcagccaacagaagcgcagcccatatcccggctcgttttttcataatcttttcctcctaaacgaactaaaaaagcatctctacgacggtaaagatgctgtaaacaacacaaaaaagcctattgtttacacatcatctgtcctcgcagaattcgtgctgatcaaacaggcaggtatcctggctcttggcgcttggccaattacagtggcgggaccgcaccggcttttaccggtttcccttttaagccggctgttgttcacggaccggcacctatttgacattcgtatccgtttttcggagtaattatactatatgactgacaggcttgtatatgtgtcctgaatgacttttccccatattgtgtatggaagcaaaatcctcgtaaacactaaatttgatcttgtatacttaataccatcatctatcaaaaggaatgattcttatggatttacagctaaaagaaaaactcgtcttaatcaccggctcgacgtccggtatcgggaaagccgccgcaaaaagctttctgcaagagggtgcggcagtcattgtcaacggacgcaaacaggagactgtcgatcgcaccattgaagagctttctggctatggaacagtgcacggtgctgctgccgatttgtcaaaaacagatgaagcagcggcttttatcgaaaaagtaaatgaaatcggtgatatcgatatccttgtcaacaaccttggtttcttcgaggtaaaagacttcgccgatgtgacagatgaagagtggaatcaatatttcgaagtgaacgtgatgagcgccgttcggacaagccgtcacttccttccaaaaatgcttgccaaaaacagcggccgcattttaaatattgcaagtgaagcaggcgtcaaaccgctgccaacgatgattccatactcaatgacaaaaacggcactgatcagcctttcaagaggaatggctgaaatgacaaaaggcacaaatgtgacggtcaactcagtgctcccgggacctacttggacagagggcgtggcctcctatatggaaggcgccgcacaagcagccggacaggatacagatacatttatcaaagactatttcaaggtcaatgagccaacctcacttattcagcgatacgcgacagcagaagaagtcgccaacacaatcgtattcctcgcgtctgacgccgcatccgccattaacggcacggcacagcgtgtggaaggcggcattatccgttctctgtagtataaaaaacgcatccgttgtttcggatgcgttttttttatacgtctccagcaaatggtaccggctgatatccgcctgtttccagttgtgctgaaaacaaccctccagcgtgaggctgctcgtatctctctttttctgtcatttgttctgttgccgttgtaatgtaaagggtttttaagtctttgccgccgaacgcgcagcacgtgacatatttagccggcacgctgattgaattgatttcttttttctgaaacgggtcaatgtgaacaacgcggctgccgccaaacagcgccacccacagcatgccattttggtcaattgtcatgccgtccggcaatccgtccgactgatcaaaacgatagacaggttctggattcgaaacatccccgctttgaggatcatagctgtaacgtacaatctcctgggtcggcgtgtcgatgtaatacatcaaattccgctcgcggtcccaatccaaaccgtttgaggtggagacttgatccttgattttgacaagactgccgtctagattcaaacggtacagcgacgcctgtttttgctcgccttccatgctcgtcgtccccgcccaaagccttccgtacgggtcacatttagcatcattaaatctcaggctctcatgcatgtccttcggctgtttaattttttccaagctgtcatcccgaagatgatacaggtaaaacccgtccttcatcgtcataatcagttcatcctttgaatatttcgcaagcgccgtcacaaaggatttgaatttgattgatcggttgattttttcttcagggtcaaagatgtggagctcgctccccaggatatcaacccaatataagcggccgttttcttcatcccataacgggccttctccaatcactgcccgagtgtctgcttccaatactgcatccatgtgttacacctctttagcttcagtctatatattgttattcccggcaaagaggtgtccaaaccacttgatgtttattgttttttaaaaaggatggtaatgaccgttccaatgttcattctgctgttcacatggatcgttccgttatgcagatggacaagctccttggcaatcgcgagcccgagacccgttccggcagttgaatcttttgtgttcgtccctctgtagtaacggttaaacaaatgggtaatcgtttcttcatccattcctttcccattgtccttcacctttaaagatatatgattttttgtttgctccagaatgacttgaatctctgttcctttgtcgttgtgcttcacggcattcccaaggaggttttctaatatgcgcctgaaccacgcttcatcaagggcaaattcaatatgctcttctttggatacaaacgagatatcatagccttcagaaaacggatttttcttaaaatcctcaatgacatttttaaaaaacgggataaggctagtgagatttctctcaataggaagagcatcatttttcagccgatacgttaaatttaagtcttcaatcagcttagacatgtattcagatttttctctgacaacctgccccatttctttcacttcttccggcgaccagtcatactgcttcgactcgagcatcatgctgtagccgtaaatgctgctgagcggtgtttttaagtcatgtgacaaaccggcaatccattcttcccttgtcgcctggattttttctctgtttcttttatcccttctcagcgtttcagtcagctgatccattgattcaaatatctcaccgaagaagcggtacggctgtttgatttttccctttttatttttgctgacaggacggccttcccggtttctaggttcctcaagcttcccttttgacagattgaccagccatctaatcgtgtgaaaaatcggcagcccgaatcggaacatataccaaacggtcatccaaatgatatacatgaacaaaacggccatcacgagaaacatcgcttttaatacaaccttcaggaatgatttgttaaactcctgatcggttacatagactgggtttggcaccgtagcgaccatccatctgtctttattgaggatcttaacggaaatttcccgcttatagttccaaggcttagagctgtatttaagcagctccagctggttcatcgtttttctttcgctttttgtgctattgatgctgtcgagaatctttccattgctgtctaacaggtaaatggcgccttttttccgtttaatatagtcgatggtactagacttatagtgcgctagtgagtctatcttttgttcacgcttttcaacggaagtcaggagctgttcactttttgatttccagccggacaatagaagatacgacttatcttcaatattgatggcccaataattcagtttatagttatgaagctttttggttttataaatagacaaaagctctttcttggtataggtgcccggcacgtcttttggcacgccgtaggaataatcagtgtttccttccgaatcaatgatttgcatccagccgtgctgtttatcaacagatttcttcaggaaattatccacttcccatgtcccgtcttcgtttacatcgagatatgcctcaagtgtgtcggtcgttgctttcgtcagccctgaattggattccgcatcgctaaaacgggcgtctaaatagaaaaacgatgcaacaagcataaccgtaagcagcaggatcacaatcagcatctggccgaaaaagtgaaacaaaaacttccatcttaacctcatgaccgcttgccttcaggatttgggataaaacgatagccgagacctcgaacggttacaatatactccggattgctcggatcgcgctcaatcttctccctaagcttgcgaatatgaaccatgacggtgttgttgtcaccgtaggaaggatagccccatactttttcatatatttgatctttggaaagcaccacgttagggtgttcacaaaaatactgcaaaagctgcagaagctgggctgaacaggcaacggcttccccgcctacgatcaactcggcattttgcggagaaaaagtaaagtaatcatatgtgtaggtttgatttgaactcgtttctttcgattgatatgtacgcttgagatgcgctctgatccgcgccgctaattccagcggattaaatggttttgtgatatagtcatcagctccaaccgcaaagcccgataatttgtccgcgtcggatgatcttgccgtcaggaaaaaaatcggagcgtctgaatactctctgatcaatgtgcaggcttcaaaaccggacattccgcccatcatgacatccagcacaatcaagtcaaccttattggccttcacaacgggaatcgcttcttctgcgcttgccgcatccagtatatttcgataaccttctttttcgagaacgcgtttgatcatgtccacaatcgctttctcatcgtctacgattaaaattgacgcattttccacttttatgttcctttctgtcactgtttttttcatcttatcattatatcgtttatttatggtacatttttgaatacattggagcttggcaaatcaaaacagcaaaaaaggagcaaacaagcgctcccttttgatgttttttcatatgaaaatattatgagttctcatctaccatgtacaaaataaactcccaaaaccccggtacatcctgacataaaagcatatcagccttttcaaacattttgatcttcagctcttgctctaaatcttctctttcttgataggacgtattgctgagtttttttctgatcatcggtgaaaagcatgcaatcaggtgctcaatgtcataagtctcgtctttttgtttctttttttgttcaaactggccgtccacagcttacttttccccctttttttgcgccgctaactgctttctgatattctccagcccctttttatgaatgttggagatgttttgtcgggactcccctaatgaatctgcaatctcctgcatcgtggcaccgtgaagatagactttcgtcagcacacttttttgtttgtcagtcagcttctggatcgcttggtagagctggtaatcctgtacatgctggctcaaatcatcctgcctgtctaaaaattcttcaaatgcatcgctacctgtttcggaaggaagccgatctcccgcctccggatgatcaaccgtcagcggataccgtttttggtttttgcgaacccgcttatcaaaatcaatagaaaagatgcgaatcattgaattcatatacttgacgatgcggatttctttataaaattgcttaaatagctcgtccaatgatcttgcatctttttcgttagggctttccattacgtttttgaacaaacggtaatgctgaggattgctcaaaaaatgcttcacgatgggatgcttcattatctccttacattttgaccgtaaaagactttgatagtccatcaaaccgcctccctactaaattaaatgaaggaaagcaaaaaaaagtaaactactactttccgcctagtgtcttccaaaatactttgcagcagtttacgttttatcggttttcctcacttacatacatgactgcagaaaaagaagggaggtattttcctatggatcaggtttttatagaggaagtcgtaaaacagatcggcaatttggggtttcccgcgctgattgcaatgtatctgctgacccgattcgaaaagaagtttgatcaactaatagaactaatgacagaaatgaaagatcatgcaaaaaaataatttttcaatcgaagttgacttttcactggtttttttcacttaacaaaacagaagggaaaacgaaaggcctttcaccttctctttctgctatcacatttaaatgtaaggaggaaacatttcatgaaaaaacaaaatgacattccgcagccaattagaggagacaaaggagcaacggtaaaaatcccgcgcaatattgaaagagaccggcaaaaccctgatatgctcgttccgcctgaaaccgatcatggcaccgtcagcaatatgaagttttcgttctctgatactcataaccgattagaaaaaggcggatatgcccgtgaagtgacagtacgtgaattgccgatttcagaaaaccttgcatccgtaaatatgcggctgaagccaggcgccattcgcgagcttcactggcataaagaagcagaatgggcttatatgatttacggaagtgcaagagtcacaattgtagatgaaaaagggcgcagctttattgacgatgtaggtgaaggagacctttggtacttcccgtcaggcttgccgcactccatccaagcgctggatgagggagctgagttcctgctagtgtttgacgatggatcattctctgaaaacagcacgttccagctgacagattggctggcccacactccaaaagaagtcattgctgcgaacttcggcgtgacaaaagaagagatttccaatttgcctggcaaagaaaaatatatatttgaaaaccaacttcctggcagtttaaaagatgatattgtggaagggccgaatggcgaagtgccttatccatttacttaccgccttcttgaacaagagccgatcgaatctgagggaggaaaagtatacattgcagattcgacaaacttcaaagtgtctaaaaccatcgcatcagcgctcgtaacagtagaacccggcgccatgagagaactgcactggcacccgaatacccacgaatggcaatactacatctccggtaaagctagaatgaccgtttttgcatctgacggccatgccagaacgtttaattaccaagccggtgatgtcggatatgtaccatttgcaatgggtcattacgttgaaaacatcggggatgaaccgcttgtctttttagaaatcttcaaagacgaccattatgctgatgtatctttaaaccaatggcttgccatgcttcctgaaacatttgttcaagcgcaccttgacttgggcaaagactttactgatgtgctttcaaaagaaaagcacccagtagtgaaaaagaaatgcagtaaataaaagacttgcggcttgcagagagcactcgttctctgcaagccttcataaggagctgaaccagtgaaacatcaaaacccttcaaaacgcttattgcggctctccataaagtacttgctggccgcagcagcagtggtgttgacctattttgctgtcatctatatattgttttctttagcgggaacgagctaccgctcagcagctcatgtcctgctttttgccgtggtatttcttgttctcggattatgctttgaaccatttgaaaggctgatgatacatagctttacatttttcaagacaggaaaacgtctattcattctccttgccggcatcgtacagctgctatttttgtggatgactgctcatacaacagaccaattgatcagcgacatctggctgtccaccacagaagaaatgattgtcgcagccgtttttttgattttagacaaatgcaactcggctcttcccagctaaaaaaagaacgcattccaattggatgcgttctttttattcatagcgaagcgcgtctacaggctgaagcttcgaagccttgatagacggaagcaagccgaagataatgccgactgccattgaaaagatgagtgctccgacaacagctggaatggagacgataaaaggcatcggaaaaatgaccgtcagcagcttggcgatgccgaagcccgccagcacaccgagtattccgccaatgcttgtcagcacgacagcctcggttaaaaattgaaataaaatcacacgccgcttagcaccgagcgctttcttaattccgatttccctcgtgcgctccgttacggaaacgagcataatattcatgacgccgataccgcccaccaaaagtgaaatactggcgattccgccaagcagcaatgcaaatgactgattaaaggactccacttcctgcgcgatctcctgaagatccattacactgtactctgctttttccagctcagcttctgacagtccctgatttaaaagatctgcagccattacacccgcttcttggatatgctcagaagaatcagcctgcacggcaatctgtgttggcgcgtcaaacccttcaataagcggccacacttttttcggcacgtacaaaaccgggttcgcatagtcgccttcaaacatgctttcctgttgatttttttctttaaaaacaccgacgaccttaaacggcacaccattcatctcaatgtttttatgcagagcttctccgtctggaaacagttcatctctgacagcttcattgatcatcactacttggtgtgtgctgtttaaatcgttttccgtcagctttctcccttcggttattcggattggaaacatgtcgaagtaatcatcgtccactccatacacttggggatacgaaacgtttgttaaatgaaaaacgctcgcgccttctgacaagtaatataaggataatcctttgaccatcggatctgatttgatcgcctttactgtttcttccgctacaggcggcgcggacgcatacgacacctgagggccgccgctctcctcttctccgccagacggctggtagacaacgttgatcgcgttgtttcccatgccgatcatactttgctttaattgctcactttggcccttcagcattgaaacaatcgcgatgattgccgctatgccgataatcacgccgagcattgtcagaatcgatcttaatttatgagaaaaaatggattgaaaggagattcgaatatgttcaagcatggctgatatcccctctctcatctaataccagctctccgtctctgataaaaacggttctgtcagcttttttggcgacgtccgggtcgtgggttatcataataatggtcttgccttcccgatgcagttcagaaaacagtgacaaaatttgttcacttgatttggtatcaagcgccccggtcggttcatcagctaaaataaacctcggctgattgacaagggccctcgctatcgccacccgctgcttttggccgccggacagcttaggcggtttgtaggagaccctgtcttttaatccgaccttttccagcgcttcatatgcccgttgccttctctcttttttcttcactttattgtagatcatcggcagctcgacattttgcagcgcggtgagacgcggcagcaaatggaaagtttgaaacacaaacccgattgattcattgcgaatttcggctaaagccccgtctttccctttcaatatatcgatctggtcaagcgtataggttcctgaggttggcctgtccaaacagccgataatattcattagcgttgactttccagaaccggaaggccccataatagctaaaaactcccccgcctgaacagtcagattgatatgtttcaagattggaacttcttcttttcccagcttgtacgacttcgaaatattattcagtgtcagcattgactgtaacctgctttccttccttgaccgcgggatcaggatagatcacataatcttccggcgtcaggccgctcttaatttccaccatgtcattttcatcagtctctccgatttcaacaggctgcttaaccgctttgtgattctcatcagctttccatacgtacggttcgccgtcatcctgaatgaccatgtcggacggcagcttgatcgtgtccgcatcagcattatcactcatcacttcgatgttgacatgatagccgacttcaagacctttatggctgtctaataaaatggtgaaaggatagttagaggactggggattcatttcttcatcagcaaagctttctgattcttcaccctcgcctgctcccgctggaagcttgccgatcgaggtgacctttcctttccactcgccctcaccgcctgttttcagcgtgaccctgactttgctgccttttttgatcgtgtccattaacagctcattgatttggcttttgaccagatatttgcctgtcgaaacaatctggatatacgggcctgctgcctggtcgcctgttgcaccgtcagcgatatcctgattgacgctttgaacgattccgtcatgcttgcttgtaatgacattggaacctttgtttttcgtcaggccagccagttctttttgatgctgcttcagttcaagctggcttgttttcaaatcgaaattggcttggtcaagttcatcttgaagctgggttttctcttctttccctgcaactttcagcttcttttccgtttccgttattgatttttgcaaacggttgatttgcagatttgtcatttcaatttgcaaattggcttgctccacttcatcagaatgatcctcgccctcatactcaaaaagcttatcgccctttttaacctgatcgccttctttgacgtatgtttttttaatgctgcctttttctgaatctatgtatactttctgctgtttctcaggttcaacctttccagaaaacgtttggcctgattctgaatctcctcccatgtataccgcgaccgattcagcatagggctccgatgatacggcaacttggttcatgtgagtaaaaaagtaaaaaccgccagcgccgatcccagccaatacaagcacaccggcacatatcgcaccgccaataagccattttttcttcttggacacaacgatctcctctttctgtaaactatgtaatattttcgaaacattctaaccaatattatctattaattcaaaaagacttgcaatccttttattgaaatgacggaatcaaatagaaaaattgtattttccaagccgaataaaaaaaatcccggcttcaaaccgggattttttcatacagtaactagctctttttcatttttaatcaagtcatatgtcaagcatacaggtttatttgtacggggatcagtcacgatttcggcatcaatctgaaatacctgcttcaaaatgtctggtgtcatgacctccagagcagttccttccttgatgaccgtgccttttttgagcgcgatcatataatgagaaaaacgagctgcatggttaagatcatgaatgaccattaaaatcgtccgcccttgctctttgttgagtctgtcaagcagctgcagaatttcaagctgatgtgcaagatcaagatacgttgtaggttcatccagcagaagcagttccgtcccttgcgcaagcgccatggcaatccacacgcgttgacgctgtccgcctgacaatgcctcaatcggccgttcagcatattcagccatgcctgtttcttcaagcgcccatttgataatccgtcggtcttcgtcatttaatctgccgaatcctgattgatgcggaaacctgccgtacgacaccaattcgtgcactgttaggccgctcggcgcttcaggtgtctgtggaagaatcgccatatcttttgcaatgtcctttgtagacattttatgaatcgctttgccgtttaaatagacggcacctgcatgtgaacgcataattctggacattgtttttaaaatcgttgatttcccgcagccgttcgggccaattaaggtggtaattttccctttaggaatcgatatatttaaatcctctacaatcgccctgtcgccataaccgattccaagctgttccgttgataatgaattcatattcggccccctcctctaattcgctttcatcaataaataaataaagtaaggcgcacctagcacggaaatgacaagtccgaccggaatttctgatggtgccaatacatttctcgccagcgtatcagcaagcaaaaacaggaatgagccgatgaaggcggagaccggtatcagcgtctggtgacgtggaccggtcagccttctagccacatgcggcgcgatcaatccgagaaacgcaatgccccccgcagctgccacgcatgaagcggcaagagtaaccgctgccagaagaagaatccgtctttccttttcaacagcggtgcccagcccggtcgccaattggtctccgagctgcataatgttcaaatagcgtgccttatataaagtaaacagaagcaagatcacaatccaagggagaatcgcccagatcatattccagttcgccccccatattgagccggatatccaaaccgcggcttgcataaaatcatgagggtccatcttaagctgaaaaatcagcaacagggcattgaatccggcattcacccctatgccgactaaaatcagccgaatcggtgtcacgccttttttccatgccagaatataaatgagaaacgcagcgaggattgctcctgccaaagcactgaatggcagcataaatgttccgaaaaagctgagatctgaagctgacccttgaaaaaagtatataaaaagcactacagcaagtgaaccgccggcgttaattccgagaataccaggctcggcaagttcattttgagacacgctttgcaaaatggctccagctacggagatccctgctccaacaagcaaagaaaggatgatccgaggcagcctgaactcaaataagacaagttcatcacgcgccgttccttggccgaaaaagacctgaagcgttttaagcggtgcaattttgataacgcccaaattgagactgataaaaaagaccaccacgataagcaaaaaggtcacagccattacaataagcggtttgtttgtttttgttttcattacagccctctcctttcacgacgtgccaaataaaagaaaaagggaacgccgatcagagaagttagcgcaccgacaggcgtttcaaagggcgcatttacgagtctggccgctatgtcagcaaaaacaagcaaaacagcaccgagcaccgccgagcaaggaatgatccaccgataatccacaccgaccaaaaaacgggtaatatgcggaatgatcagcccgataaatgcaatggtgccggcaatggaaaccgcagctccggtcagaattactacaataagcatgcccaccagtttcactgctgatgtatattgtccaagccctttcgccagatcgtcaccgagacttaacactgtcacagatcgggcgataaaaaacgcgagcgttaaaccgacagcccctgcaataagcaaaagctggacccccgaccatttcacacccgctaccccgccagcgtaccaaaagctgatatcctgagcgacatcaaagcggattgcaatggcagttgaaatgccggtaaagaaataagtaactgccgtacccgccagagcaagctttacaggcgtaagtccgccccttgaaaacaagccgatgcccattaccgtcgatgcccccagccccgctcccgcaaaggaccatagcacaagccccattgcagaaagtccgggaaaaaaggcaaacgcaatcgaaaccgcaaacgcagagcctgatgtcacacccataatcgaaggctctgccaaagggtttctcgtcatcccctgcatgattgctcccgacactgccaacaatgcgcctacaagcgcggcagccgccgttctcggaagccgaagatcatgtataatttggtgagatgtctttgtcggctgataatgaaaaatggcgtcccatacagtgcgcaaatgaatatccgctgcaccgagggatatggataaaaatgcgccaaggcaaagcaggcatagacctgcaataaggacgatgaccgcgccatatgtccttgacgtccattggatttcttctgatgcagtccgtatatttttatgttgactcaactgccgtacttcctttctgttactgataatgattatcaattgctgtttcagtatatcacttttttcagctgatttaatagagtgttttgaacaaaaatgaaaatgcatttgcaaaaatatcgtgtcaaccggcacttgcagtggtataatcacagatgataatgattctctttttcatctattttttagaaagaaggtatgagatatgacccatatatacaagaaactcggagccgcgttttttgccctgttattgattgcagcgctggcagcctgcgggaataactcagaaagcaaaggttctgcctctgattcaaaaggcgcagaaacctttacatacaaggctgaaaacggaaatgtaaaaatcccgaagcatcctaaacgggtggttgtcatggcagacggctattacggctacttcaaaacactcggcatcaacgttgtcggtgcgcctgagaatgtatttaaaaacccttactacaaaggaaaaaccgacggcgttgaaaacatcggagacggcacttcggttgaaaaggtcattgatttgaaccctgacctgattatcgtctggacaacacagggcgctgatattaaaaagcttgaaaaaattgcgccgactgtcgcagtaaaatacgataagctcgacaacatcgaacagctgaaagaatttgcaaaaatgacgggaactgaagataaagctgaaaaatggctggccaagtgggataaaaaagttgcggccgctaaaacaaaaatcaaaaaagcggtcggtgacaaaaccatttccattatgcaaacgaacggaaaagacatttacgtattcggtaaagactttggaagaggcggaagcatcatttacaaagaccttggcctgcaggctacaaagctgacaaaagaaaaagccattgaccaggggccaggttatacaagtatttcattagagaagctccctgactttgccggggattacattttcgcgggcccatggcaatcaggcggtgatgatggcggcgtttttgaaagctccatttggaagaacctgaatgccgttaaaaatggccatgtctacaagatggatccgatcggtttctatttctctgacccgatttcattagaaggacaactgaagtttattacggaaagcttgactaaataaacaaaagagccgcctgcccgcggctcttttgcaaatttataaggaacagctcaatttgaatcatatcagatattttctttgagccattcatattaagctgcatcctcatcgcgatcagtttttttatgctggagagactgaaaaacgttttttgcatattcgattgtgccttaaagtttttctttcgatttcagctttcctgtcagctaggttaacgaacggattcttaacagaagaaattgtgattttataaaaaagacacctgagcaaatcaggtgtcttttcattatgcttgtttttctttctggaactttttactcacaaatgtataaacgattaagccgacaaagaataaaccgatgccgaggataaatgtcgttaaatctgctgtgcctgttacgataacaaacacggagtatgcacacgccagtatcgcgatcaatccgtctcttacacgggagcctttcagctggtcatacgtttcacctttgatgactaccttcaagctgtagattgcagataccagatacggaattaaatatgcgagtgtagccgctgtcgttaaaaatgtaaatgcgtcacttattgtccgggaaataaccgagaaaatgaagacctgtgacatgacgtttgtaataatgagtgcaatgaccggacttccctttttattcgtttttgcaaaaaatgccgggaaatctcctgctttagcggcttggtatggcacctcagagccaagcaaaatccagccgagcatcgttccgaataaacaaaggatagccaaaagcgccataatcacgcttcccgcgtttccaacaatcgcatagagtacatcaacaaatggtttttcagagccgacaagcttatcatgcggcagaacacccatcgtaattaaagtcacaataatatatatgctcaaggcaatcagcaagccggtaattgtcgcacgtttcacatcacgctgagagcgcgcacggccggacaggatcaccgcggattcaattccgacaaacgcccacagtgtagaaatcgcggcgttatgaacctggccgccaattccaatgcttgtgccgttttctccttgaaccgggaaataaaaatgaccgaataatgtcgtttgaaacacaaacaaaccggcaacgataaagaagacaaaacctaatactttagaaagcgttgtgacaaagtttaatttacttgcgccgttaatgctggcaacaagaatcgcgtgcgttccccataacaagatcgtacatacggcaaacgtcagtaattggccgagtgtcacctcttgcccgccgatcgaaaacatctcacgtttatcaaccaagatcgggaagaacgaagtcaagtaaccggcgagacttgtgatgatcgccacgttgctgatccagctcgccacccagtagccccacaccattgtgaaaccggcagcgttgccttttttcgggtcagaaaacagcgctcttgcataactttgcggtcccgctgtcagttcaggcttgcgaatggacaagtgtccgaacacaagtgcaatcatcagcacgccggcacctgtcaaaagccaggcggacgtagctccaaacggactcgcaattgaagcaagcgagctcggcaaggagaaaattcctgatccaaccatatttccaacgacaaacgccgttaataaccaaaaaccccatttttttgtctgttccattccagtacctccatgattctttgtacggaccagaccccgagatcatataaacgcaaaaaaagcctgaacaaaagtccatgcttaaagaaacacacacccttgatctccggatagccctccgcgaaaaagcacgcggcagtcctgcacttattcagatacagtcccagcatagagaaggatcggctttctccacacttcggcgctgatgccttttacacatgtttaacagcccctgtcagcctggcatgtgtgacttatcatccgcgcaacctctacctcactgagaaagagtgaggatttaattattcagttactcccagaaggttatcaaagaaaggatgatctgtcaaagggaacagatggaaaatacggatagagccaagccctatccgcatgtgattatcgattatttttctttttttgcacagcttcttgaagcggatcatcttttagagctgaaccagcatcttcaagagctccttggattacgtttttttctttttcggaacgttttcctttatctttattaaagaaacccattcgtatcacctcttttaaaaaataggtacatgtttaagatgcctcttttatgaaaaattatgcgggatattttttatcgtccaaagtcctgttgatcaaacatacattctcttgatatatttgtaattcagagattttttgcaaaagataaaaggagaagcggcaaatgacaggaaaaacacacatcatgggaggcatcgcttcttgtacggcagcggcttattattatggatttgatccagtgcttatggctgcgtcaggcgcggttggagcattaatacccgatatctgccacacacaaagcaaaatcgggagaaaatttcctattttatcgaaagtggtcagctccgtttttggccatcgtacatttacacacagcttgctgtttatgctcatcatgttttttatcacttctacatacattccagataaaaacatatcagccggcctgatgatcggaatggcaagccacttgattcttgacgcttggacggtaaacggaatcaaattattattcccttcaacgatccgcgttcggcttccattatatatgaagacaggcagtttttctgagcagctcgtgctagctggcctgacccttgcttcatgttactacttttatatgctgtttcatgggcgcatgttttaaacatgagtgctgagacttgtctgaaccggctgtttttagtaggttttacttaagaagcatttcatgcagatgatcaagaaaacgcgaggagtcatattgatgaaaggaaccttttttcacaatcagcggtttttatgtttttcgatcttatttatgtggatcaaaacgtatgtgatatataaactcggctttgatttgcaaatcgatactctgttggaggagctaatgctgctggtcaacccgctcagctttattcttcctttattcgggatcggcctgtttctaaaagaaaacaagcagcgggcctttttgctgatcgccaatttggttctgactgttatcttgatctctaatacgattttttacggcttttatatcgattttattaccatcccggttttatttcaggccagcaacatgagcgatatgggcagcagtgtaaaagaactgttccatcctctgtttatcgccctgtttgtggatttggtttttctgctgctgttcgccagaaaaaccaaacacccacagacaaaagccgctccccgcacgatcaaacggtactatgcagcttcctgcggcatgcttttatgcacactggcacttgcagaagtacagcagccgaagcttttggcacattcttttgaccgggaaatgctagtcaaaagcatcggtctgtttcagttccatatttacgatacaatttctcagactgttaatatcagcgcgaaagcttttgccgatgaagacagtataactgccattaaaaactacacagaggctgattacagcaagcctgatcaaagcaaattcggtcttgcaaaggggcgcaatgtcatctttgtaacacttgaatcgacccaaagctttgttctgaatgaaaaagtaaatggaaaagaaattaccccatttatgaatgatctcataaaaaaaagctattcctttgatcatttctatcagcaaacagaacaaggaaaaacatcagattcagaatttatcgtcgctaactcactgtatccttcccttagcggcgccgtctttttcacgaaaagcgaccatcaatttcatacgatgtataaatcgctgaaacagcacgattattattcagccgtctttcatgctaaccataaaacattttggaacagagatgtcatgtacgatacgtttggcattgaccgcttttttgatgttgatgattttcatgtcactcccgggacatcgacaagctggggcttaaaagacaaagaatttttagagcagtccgccgaaaagctgaaaagcctgccacagccgttctacagcagttttatcacgttaacgaatcattttccgtttgagattgatgaaaaggatcagctgatagatgaattcgattcaagcagtgatctgttaaaccgctatgtgaccacggttcgctatgaggatgaagcattgaggcattttatcaaaaaactgaaagacgaaggcttatacgaaaattcgatgatcgtatttatgggagatcattacggcatttctgaagcccataacgaggcaatggctgagtttttagggaaagacgaaatcacaccgtatgacaacgttcagctccagcgggtgccgtttatcatacatatcccgggaatcaccgatcaaaagccggaaaccatccctgatgccgggggacaggtcgacgtcaggccgacgctgatgcatttgctcggcgttgagacaaaaggcgatatccaattcggcaatgatttgctgtcgggcgaccgcaccccattcgccgttctgcgaaacggcagctttattacgaacgattatatatacacaaagaacacgtgctatagccaaaaaacaggtgaagtgctggaagatcaggatgcgtgcctcccttataaggagaaagcaaacgaagaactgtctttctctgataaaattttaaatggtgacctgctcaggttttccgaatgaaaaaaatccctctatcaagagggattttttacgtttccaatatcaccttgccagtcagcttcgtttcatagccgtttaattgagacaaattcgccttgtattcctcagaattcaaaatctccttcacggccttaagcagctgctcatgttttttcaaaacgacaatatcatattgttcgtcgatgagcgggataaaatcaacactgcccatatgtgccgcgtgctgtgccccgattcccgcgtcagcctgtccgcttgaaacttgtgaagcggcagcgtaatgatcggtcacgatatcgtcgtatccctttacatcagccggattcacaccaagcaagccaagctgttcatcaaggagcacccttgcgccagaacccttttccctgttgatgatccggatatcggctcttttcaagtctttccagccttgaatgtttttcggattccctttttgcacatacagtcctgctttccggagaacgacattgatgagacaaaacggttcacctgtcaagatccgtttcacataaggagcgttatactggcccgtttcagcatcgtacaaatggaggctgacaatgtcacacttgccttgatacatatcaatcaggctgtttaagcttcctttgtatttacggagcggcgtctcttgaatggcattctccaaatgcttgctgagaagatccatcgaaatgtcctgtccgctgatcatgacattcggtctgccgtccggctcagcctcctgcacctgtttcggtgcttctgttgcagcgatgggctgagacattctcatattcgttttatattgctttaaatcttcttcatccacacgcatctgccttccgacacgataagcaggcagcacgccttttttaatcaagtcataaacggtcagctttgataccttcagcagacctgcaacttcttctatcgtataggaagaggtttcattcatcatcatcactctcctattttattataccttttcgttgaatgtaaaaaaacccacataaaccaaacataatcagttataattagttatatctaatgataaggggtgcaatcatgtttaagaagtattctattttcatcgcagccttaaccgcttttctgcttgcagcaggctgttcttcaaaccagtcttcaacggacagcgagaaaaaagtaacgttaactatctcagctgccgccagcgcgcaggatgcacttgaggaaatccaaaaaaattatgaaaaagagcatcaaagtattaccatccaagataactatggctcatccggcgccttgcaaaaacagatttctcaaggagcaggagcagatctgttcttctcagctgctgaggataaatttaaaaagctggtggatgatggagatatcgcaaaaaaagacagcactgatttagtcggtaatgaaattgtgctggtcgtaccgaaaaacggagattcacctgtgacaagcttcagcaatctggctgaatcagaaaaaatcgctctcggcacgccggaatccgtaccggcaggagcttatgggaaagaatcactgacaaagctgtctctatgggacaaagtgaaggataaaattgtgtatggaaaagacgttcgccaagttctttcttatgttgaaactggcaatgtagacgcaggtattgtttataaaacagatgccctggtctcgaaaaaggtcaacattatcgacgaggcaaaagcagatacacacagcccaattatctatccgttaggaatcgtaaaagatacaaaacaccgtaaggaagcgaaggaattttacgaatacctgcaatctgatgaagcaatgaaagtatttgagaaatatggctttactgccaagtagcataagcgcttcagaatttttcacacccgttgtgctttcctttcaggtggcggcagttgccggaattgttgtcattattctcggaacacttgctggagcatggatgtcacgggcatcatttttcggaaaaacggcactcgaaacatgttttatgcttccgctcgttcttccgcctactgttgtcggttttattttgatcgtcattttcggaaagcacagcttcatcggacaagccatcgagtggattttccagcagcctgtcattttcacctggtgggccgctgtgatcgcctcggctgttgtagcctttccgcttatgtatcaatcagccaaaaccggatttgctgacattgatcccgatatacaaggtgcggcaatggtagacggcgctagcagatggaaagtgtttatccatatctccgtcccgcttgcctatccttcgttactgaccggaagcatcctcagccttgcgcgggcgctcggagaatttggcgcaacactcatgtttgcaggaaacatccccggtgttacgcaaacactgccgacggcgatatatgtcgcattggattccggcaacaatacccttgcttgggcgtgggtcgtctgtattgttgtcatttcctttttgatgctgtttttcattcaacagaaaaaaacgcactaaaaaaactccccataacagggagttttttgattaaaacagaagctcatcaggatttgggccgacacgctcatctttatttaatgcgtcaattttgtccatgtcttcttgagacaattcgaaatcaaaaatatcagcgttttcgatgatacggtgttctttaatggattttggaatggttacaacttcatgctgcagatcccagcgcaaaatcacttgagccacagatttattgtgtttttcagcaatctgtgtcagtacttcgttatccaaaagctgtccctgcatgagcggagaccacgcttccagctgaatgccttgcgctttgcagtaatctcttaattctttttgcgtcaagcgagggtgaaactcaacttggttcaccatcggtttgatttcagcatctttcaacagctcttctaaatgatgaacttggaagttgctgacgccgatcgcgcggattttgccgtctttgtacagcttttcaagcgcgcgccatgtatctttatatttatctttgccaggccagtggatcaaatataaatctaagtaatcaagctgcaatctttccagactcttttcaaaggcagcaagcgttgtttcgtagccttgatcttcattccacacttttgatgtgatgaagagctcttctcttgccacaccggattctttaatcccgatgccaacgccttcttcatttttgtagatcgctgctgtatcaatgctgcgatagccatttttaattgccgctttcactgattcagtcgcttcattaccattttctactttaaaaacacccagaccgaaccaaggcatttcaactccgttatgtaactttacagtatcttttaaacttgttggcacttgaacatccaccctttcactgaaatgtaagcgtctatattatctcacattcctctcagccgataccaataatacgcttaagaccctctttttgcttcttttttcacagcacaggcaaatccaaacactatttttttcctattttaacaatattgagattacaaatacattgagcagggtatgcgtgtagtgtaaccaaatgaaaacaaaggaggaaacaacttgaaacgtattcgtatcccaatgacacttgctcttggtgccgctttgacaattgcccctttgtcctttgcttccgctgaagaaaatcctgctccgaagatgtcgcagacaactgctgctggaacaactgccgctgatgtaggtttaaacgtcaatctggatgtacttggaattgccaaccagatcgctgatgccatcaaatccgcacagaacagggatgggtttgtgaaaaacctcatggagtcttccttctacgcatccggccaaaaatataatgtcatggtctttaatttaagccaggaatatgaagatcatttgaacggtgtgcaattttacggctcagccgtttacgacggcattacgtatggcatttgggtatttgaagatggaacctttacaaacaaaggcgatggcggctggatcaactgggccttcagaggctggttcgaccgggatggcagcactgtcgcatttcatcgcccttaatatagaaaaaagctggcgctctaacgccagcttttttgctgcatttattcgccgccttcaagcatggcggcttcgacatcattaatgtattggcgaagctcatgggagatgtcccgggaaatttctctttcctcgaaaagtgtttgaatttcatttctgatcgcctgtacagccttcagcttcacttccagcttctgattttcaaaatgggcgcttgatttcagctcatgatggctgtgctccagcctgaaaattaactgtttatagaatgtaatgacagataaaaacacttctttatgctcttccgtcttgtgtttttccagatattctatcgctgcttttgccgttttcactcttgttgcccgtatcaatcccgcttcatttaaaatcgacatctccggctttttatgttcaccgaagaaaatccaatacatcagcctcttgagccttgtttttgataatccgactttaaacgggttcgcatacaaaatttccaactcgttaaatcgttcttgcagcacatttgctgtttcttccgggatgtctccccgctccagcattttcatcagcgcctcttgctctgccttaaccccttgggcacggactttacgctcgtgctttttgatgcgattagacgatgtatattgctgaaaacgaagatttttcattttctcattgtattcagctatcaccgcaagcgaggccgttttgtttgtctcattcatgtcctctttaatcgtttgaagggctgttttgatcaatttgcgtctcgccgtcagcagcttcttgtttcgttcctcgtcctcttcttctttttcagtcagaatcggcagcacaacggtagcaatgacaagcgtgcataaaatgacgccggctgctaaaaagagaatcagatttctttccggaaacggcgtgccgtcctccaggaaatacggaatggaaaaagaacctgcaagcgttactgctccacgcacaccggaaatcgaaattaacagcgtcgaacgaagacccggtttatagatgttctgatctttattaaagaaccatttgccgttccagaagaacagcacccacaggaatctcaggagcattaacgtaaatgtgatgactaggatatagccgatcaccttcatgttgctgatggcagtgtcgttaaagataacagaaataacatcagggatttgcgtgccgagaataacgaagaccagaccgttcaaaataaataaaataatgttccacgtacttgaggagacaatttgcagcttgatcatcgttgattccagacgatcctgttcaaccgcatgggtaataccgccagccacaacagctaaaatgccggaaacgccgatttcttcagctgccaaataaatcacaaacggcgtcagaatttgaatcagcatatgcatcgtgacatcctgcatgccaaggcggcgcagaaataggcgaaaacgaataatcaaaaatgaaatgacaaccccgcacagcaagcctccgagagaaataaagacaaagctgacagccgcttgtgctaatgaaaatgcgccagtcactgccgctgcaatcgcaaacttaaaggccaccagacctgatgcgtcattcatcagcccctcaccttccagcaggcgaagaatcccttttggcattttcactcttcctgataatgcgctgacagcgacgacatcagtcggtgaaagaatggccgcaagtccaaaggccgctgccagcggaatagcaggaatcatccagtgaatcgtgtagccgcctacaatcacagtcgcaaatacaaggccgagtgcaagcaataaaatcggagcccttaaattccaaagctctgcccgcggtgtcctctttccatcattaaatagcagaggcgcgataaaaagaacaaaaaacaattcggtgtttaattcaaaatgaagtccctgtggaaatgaggcggcaagaatcccaagagccacttgaatcagcggcaccggaataaacggaataaaccggttcacgatattagaaatcgcaataatcgttaataatacgagcacaactaaaaatatgtccaaatgcatgacctccttcgtctgttgtgtgtcggcatgatgagccaaaaaatctgtttgtctaaaagcccttgagctagggtggccttgcatccgctatgtggttccgcaggagttctctccacacttgtcttcttttatagtaccctttttagggtattttttctcatgatatgctcacagtgaacttttttgcagcagagcaaattacagaaaaaagagacaggaagctactccctgtctctcgtctttctttctcaatcatgaaaattcgtaccgtcagttgttgctttgataatgcccgcgcggatgacaaagtcaccgaaatgctcgccttcctcacgttctttcgcatagcgggaaagaaggatgcgcagctcgcttaaaatgtctgcttcaccgatgttttcacggtacattttgcttaaacggcttccgtcaaacgcagcgccaagatacatattatatttgcccggcgcctttccgataaatccgatctcaccgagtgcatgacgtgcacagccgttcggacaccctgtcatgcgaatggtgatttcctgatcacgaaggccgttttcgtcaataatctcttcaatcttatctaacagggtcggcaaataacgttctgcttcggccattgccaatccgcaggtcggaagagcgacgcatgccatcgagctgcggcgaagtgctgaatagtgcttgccgtcagttagtccgtactgttcaattaaagcactgatttcttcttttttatcgcttgaaacgttcgcaatcattaagttctgattggctgtcagccggaactcacctgtatgaactttggcgatttcccgcaagccagtcatcagcttataatcatcgtaatccgttatacggccgccttcgacaaacagcgtgaaatgccatttatcctcgatgccttccacccagccatagcggtcgccgttatgatcgaaatgatacggcttcgcttcttccaggctccagccgagacggttttccaattcttcttttacgttttctaaaccgaggcggtcaactgtgtatttgaaccgcgcatttttacggacagaacggttgccgtaatcacgctgaatcgtaatcgttttttcagcaacgtcatacatttgctcaggccggcagaatccgatcaccttggctaattgcggatatgtcgcagtatcgccatgcgtcattcccataccgccgccgattgccacgttaaaaccgatcagcttgccatcctcgacaatcgcaatgaatccgagatcttgtgaaaagacgtcaatatcattagacggcggaacggcaataccgattttaaacttccgcggcagatagagcggtccgtacattggctcgacttcttcctccggcgtgccggcaactctttcctcatcaagccaaatttcatgatatgctctcgtccgcggcagcagatcatcacttaattttttagaccactcgtatacctctgagtggatttcagattgataagggtttgatgcacacatgacgttacggtttacgtctccgcaggctgcgatcgtatccaaaagtgctgagtggatcgtctgaatggttttcttcatgttccatttcagaatcccgtgcatttggaacgtttcacgtgtcgtcaattttaatgtgccgttcccgtatttctgggacaggtcatccatgacaagccattgttcaggcgtcgagacgcccccgggcatacgcacgcgcagcatgaactgatatgcgggctcaagcttctgcttttggcgttcatttcggaggtcgcggtcatcctgcaaataactgccgtggtgtttcatcaggcggttatcatcatccggaattcccgcactgattcgatcgagcatcacttctttcagcgtgccgcgcaaataatcactttcttttttaatgcgttcaacatcacttggagagccgtccggtgcttttagaattttggtcaccatgttgaaaaactcctttcaagtcaaatcaatatacatcacgctgatagcgtttttgctgctgcatatcggcaagataagcctccgcttcttcgcggctcatattgccttctttttcgataatttcaagcaatgtgttatggacgtcatgcgccatgtgcttttcatctccgcaaatgtaaacagccgctccttcttgaagccattcaaacaattctgcgctatgttcaagcatgcggtgctgcacatatactttttcttccgtatcacgtgagaacgccacatccatttttgtcagcacaccgtctttgagccaattctgccactctgtctggtaaaggaaatccgtgacaaagtgctgatcgccaaagaacatccatgcctttccttccgctcccgtctcctcacgctcctgcataaaggaacggaaaggtgcgacgcctgtcccagggcccaccatgataatcggtgtttcagggtctttcggaagcttaaagttttgattgtgctgtacataaaccggcagtgtgtctcccggctgcagacgttccgcgcacaaaatcgagcagacgccttttcgttcacggccgtgcgcatcgtagcggactgcgccgattgttaaatgcacttcatccggatttgcggataaactgcttgcaatcgaataaaggcgggcaggcatttttcgcaaaatcgagacaaactcctgcgcagatacactaaatgggccatagtcacggacgagatcaagcaaatcgcgcccttcaatataggcttttacattctcctcatttcccggggctaaaagctctctaagctcatcgttccctgtcagctgggctgcctgttcaagaagcggttttgtgagaacggtaatctcatagtgagaaatcagcgcttctttcagcggacggacatcaccttgcttattaagcgtcacaatttcttccgggtcccaattcatttccttaaggagcagctcgacaagttccggatcgttttctggatagacgccgaggctgtcaccaggctcgtaagtcaggcctgatccttcaagagacagctccacatggcgtgtttctttatttgatcctctgccgtttaaatttaaattttctaacacttcagcccgaaacgggtttgttctggaatacgaagactcaccggtttgtgacgcagccgccggcgcaggcgcggcggttccgcccccagcttcatttaatcccttcaatacaccctcaagccattcggctgccggttcatcatagtcaagatcgcaatcaacgcgcggagaaatccgttttccgccgagttcttctaagcgctgatcaaattctttccctgtctggcagaaaaattcgtacgaactgtcaccaagcgccaaaacggaaaagcgcaggtcttcaagcttaggcgcccgtcttccgtgcagaaattcatgaaacgacagcgcgttatcaggcggctcgccttctccatgcgtactgacgacgattaaaagattggttaccttcttcagctgattcggcttaaaatcgctcatggatgagacggtcacttgaaaaccgctctgttcaagctgcttgccggcattttccgcaagcccctgtgcgtttcccgtctgtgaaccataaagaacggtcacttcttttgaaacggccggtgcttccgcagacacagctgccgccggcgcacccgcagtttcttgggcggaaacagattgcgcggataagtatccgctcagccagattttctgggattcggtcaaggtcggcagaaggcggttaaggagctctgcctgctcctgattaaacggactgttcattacctgaagttgcaacgtatccacctcacaaagttataaactgatcgaaaattgcatctaattgaactttaccggaatactaggcttaagtaaaatatatttacatgatgataactattaagaatcctaatgataaaacggctatgcttcatgtaaatagaaaaaagagaaggactcccttctcttcattcagccatctgatataagtgaggcggcacagcggttacaaacggactggcttcacctgtataaaatactgccagcatgtgcatcgcacgggtgcacgcagtatataaaagcctgcggtcgtgctctgtatgatagtgttcttcagatgcatcatagacaagcactgcgtcaaattcaattcccttcgctaaatacaccggaatcacgcaaacacccttttgaaatggttgattttctttatgaatcaggcgaacatctgtatattcactcatgtgggcgtgcgcctgtatgcattgctgcgcagtcttgcagatgacggctattgtttcgcgcccttttttcttgagccggccaatttcttgcgcgagcttttggcaaaggctctcatgtccttcagttttgacaacgagcggcatttccccgcttctattaaacggctcaatatccgctccatattgaagcatcgctttggtaaactcgacaatctgccttgttgatctgtatgttctctttaaacgaacatactcagcaggctcatcctcaaagcacgcatccatacgctgatccccgtgtatggtatgcgcgtagatggactgattgatatcaccgagcactgtcatgctggcagccggaaaaatgcttctcatgtaaaccatctgaaacggtgaatagtcctgagcttcgtcaataaatagatgtttgatcttcgtatttttctttctgccctcaatcagatcctgcatataaagaaacggtgctgcgtcctcatagagcaatttattatccgtaaatgccgaactggtcagctcacctatcgcgtccatcttctcatgctgaaattttcctccccagccagaaaacaattgcaaataaagttgtgtaacatcaagaaatgcaaggagtctgaccgcctgtttgagcggtttgaaagcttttttcacaatgatggcggcaagcagctgctgctctctttgataatcgttaaacgtactctcgctgaaccgtttcctttcttgcagttttctgtacacgtccaagtagtcctctttgtcaagcagctcagcttcatgaacaacccaatcctttcgccgttcctttttctcaagcttgttaagctcactcagcagccacttcgcggtttgctccatccgattcggaatggagtgattttgatccaatgagtaaaaataggattgaatttgctcctttgtgatcagcttttgtccgcggaatataatatttttaaaaatcatcccttcagaggaaagccgtgtgacgtattcattaatgaattgctgaaaggataaacccgccttccatgtgattcccgcaagccttgttggaaaatcgccttccttagtttcggtcaggcaatattcgagctgatcaaaggcgctttcacatttgaacttgcggccaagacgatgctcgatatattcctgaaacgtcgcctgctccatattctcttctcctaactcaggcaaaacagaggatacatagctgttaaataagaagttgggagaaaacaaaacgatttgtccggcatcaatgacgccgcggtgcctgtataacaaataagcgacacgctgaagcgcagccgatgttttcccgctgccagccgctccctgcacgatcaggatcttgcttttttcattacggataatctgattttgttctttctgaatcgtagacacgatgtttttcatttgggtatcggagtgatggcttaatacctcttgcagcatttcatcgccaatcgtcatatcggtattaaacatcgccttgagagtgccgtttttgatcataaactggcgtttcagcaccatttccccttctatcgtttcaccgggcacctcgtactccgcttttcctggagaataattgtagtacaaacttgatatcggcgccctccagtcatagatcagaaagtgttcctctttctcatccaaacaggaagctaaaccgatataaattcgctctgcctccgcctcgccgttttcaataaaatcaatccggccgaaataaggcgattttttcaattgatgaattcgtttgagctgctgatccatgcgccgatgattctgttcccgatcagacagcagctctgcctgctgcttaatgcttgccatcgtttcaatcgcttcatgggcatcatcaaaattaaccttaacatcctcccaaaagctttttcttaatccgatgatatcatgcttcaacccgcccgcagacgtttccagaaaccgctcttttttttcgagctccttcagcacctcatctattctcgactgctcttccttccattccttatcctgctgattcatgaacggcacctccagaaaatagttgacaaacatagatgaaatactgtaaaatataattggatacatatattaaatatatgatgtaaactggcaaatacaatttataatagcacattcacccaataccaatcaaggtttgggttatttatatgcagaaaaaaccgatttcaactcgaaatcggttttttctcttatgatttcacattgatcactgttggacgtgcttttcttaggttgcgaatcttctctttcatcagtatcgattccttattcctttcaatcttcgatataatatatctttttcattttaaaaacaccgcagagctttaccgtatttgtctgttcatctaacgtgaagaatgactaaactggctgttattgtcatcttccataaagcaactacatctctgctatcgtatctatagtcgcagtaaaatagtcatttttcacccattttcgacacatttcaacaaattaaagtttttcatttgggagaataggacgatgttacattatttctctcggtttatgatatgaacatgaagaaagaaccagaattagttaggaggaaatactcagtgaagaaaaagctatctatgttgttgctggcattcgtcgtagccgtaacaagttttacgtcaattgacctagtaaacaacaaagcggaagctaaagattgggttaaaaaaggtcaaatatggagtactcattaccattcgggctcatttaaaaactatacttactcgccaacttttcatatttattatccaggacgaggaacttgggccaacatgacatcaaatggatcaggcagcgggaaaattacagcaactctgcaacaaaagacaaataaaggctggaaaaatgttaaaactttttacgcaacgaaaaaaggctctacaaatttaagttacaaacaagcttctaaaagctacaaaacaaaatacagattcaaattcactaacacaggaactaaaaaaaccatcagctataccttttgggctacctattaatttcaaatagctttgctctgcgcggtcagcattcgaaaaggactttttatttgatcccggcaggctaccataaaagaaacctctccgtcatggagaggtttcttttattttactgactatctaagcgaaaagaacggtttggcagcttccaattaaacatataggaacaaacccggcaaacaacgagcacgaaaaacagaacgtataagccgaacgagttccccatccagcccaagccgacgattaaaccgccgagagccgcccagactgcataaatttctgccttcagcacaagcggtttgcgaccggcaagaaggtcgcggatgattccgcccccgcttcccgtcagcaccgcagccacgatcacggcactaagcggatggcccattttgacagcatacagtgcgccttggatagcaaaggcagcgaggccgatcgcatctgataaattgccccacttattccaatgcttcagcagcagcttcggaaacagaaacacaattgtaatagataaaagcgcgatttgaaagtacgctccctgctcccatagcgctgacaccggaacaccgatcagcaaattgcggatcgctcctcctccaaaagctgtgacaatccctaatatataaactcctaaaatatcatattcctcttccatcgcaacaattgcgccgctgactgcaaacgcaatgatgccaatcacactaagcagctcccaagccattctgatgactcccttttatgtttgttaaattttctgacgacctctagattttataatcgctccagcgtaaaatcaataacatttttatgagaaaaaaagataaatttagagggaatacggctattgctgatggacatgagtttgcgaaattaaaaaagcgcccggcatacgcgggcgctttttttgttattcagatttttcgcctttcagcaggcacataaaaatgataatcaggataaaagcaatcagggccaggaatggaatcgtaataaaaccaaaccagttaatatattggcccgagcacggcacgccgcttacacacggcttaatgccgctaaaaccgggcactttttgttctaagtaatgcatggttgaaatgaatgcccctataatcgccatcgggagcacatattttttcactcgtgtgtccccttgaaaggtggcgatgcctaaaatcagaacgagcggatacatgaggatacgctggtaccagcacagttcacatggaataaactttctgatttcactgaaatacaggctgcccagcatagcgataagagccacaacccaggaagcatataaaaatacgattctatttttcatatcgttacttccctttcagctctttttctattgtctctttgatttcatcataatccgcaaaatttttgatcactttatcattgacgtaaattgtcggtgttgcctgtatgttcattttttgattaaggtcagaatccttttccacttgagaagcgaatgtttccttatcaagattttccttgagcgtctcaggttttatctttgtggtgctttttgcaagatcaccaaggaggcctggggttacccattcctgttccgtatccggctgtttttcgaacagcttttcatggaaatcccagaaagagtcagggtcttccttccatacttcttcagatgcaagagccgctaatcttgaaccttttccatggaacatgacgttcacgaaagaaaatttcacatcgcccttatcaataaagtctttttgtatttttggaaagatgtcactgttaaacaccttgcaagacggacatttgtaatctccgaattctactacagttaccggtgcatcgtccttgccaagcacaggctgccctttgatagacggctgtccggaaaccgcatcattgccttgttccgttttgttattaatgatgacaatggctgctagcaatacaacaaccacaaccgtaaggatgaccgcgaatttcgcagaagactgctgtttctttttcactccgacacctcatcgttttaaaattaaaaaagaagcggatcgcaattgatccacttctttattttaacaagacaagcgccgataagaaaaccccgaaaaaatgaattctctccgacaatttatttgtttttgagacgcatgacgcgcatagcgtttgccacagcgagcagtgtaacaccgacatctgagaaaaccgcttcccacatggttgcaattccaaatgctccaagaatgagaaagatcgctttcacacctaaagcaaagccgatgttttgccacacgattcgccgtgtccgtttcgcaatccgaatcgcttctgctatttttgacggctgatctgtcatcagcacgatgtctgcggcttctaccgcggcgtctgacccaaggcctcccatcgcaacccctatatctgcgcgtgcaagcaccggcgtatcattgatgccgtcaccgacaaaaatgagtttttcactaggcaaaagcttagcttctaatgcttcgacctgcgccactttatcttgcggcagcagctctgcatatacctcaccaatcccaagctgttttccgacggcttctcccgtttgtttcgaatcacccgtcagcatagctgtctgtttgatcccaagcgactttagatcagcaaccgcctgtgctgcgtcttcctttacttcatccgctatgatgattgctccggcatagcgttgatcaacagcaacgtgtacgattgttccagcattttcatccgggacatcctcaatttgttctctttccatgagctttttattcccggcaaggatctcagttccatttacctttgcaaaaatgccgtggccggggatttcttcgtatgactctatctcatcggaggaaagcattttcccgtaagctttacgcacagattcagcaatcggatgctgtgaatgaagctcagcgtatgccgccgcttcaagtaatctatcctttgtaaaaccttccgcgggtttgatttctgtcacttcaaagctgccttttgttagtgttcccgttttatcaaacaccgcgtatttgacttgattcaaagcttctaaataattgcttccctttacaagcactccggcctttgaggccgctccgattccgccgaagaaaccgagcggaatggagacaacaagcgcacaaggacaagaaatcactaaaaagataagcgcgcggtacacccaatcggaaagcgcggcgccagaaagaacaagcggcggaacaaaggccagcaataccgcgatgatcacaacagcaggtgtataatacttggcaaacttcgtgataaagttttctgtccgggctttacggctgctcgcattctgaaccaagtctaatatttttgatactgctgattcttgatagccctttgtgacttcaatatgcagaacgccgttttgattgataaagcctgacattacatcttgtcctaccgcagcttttctcggaacggactcacctgttaaagcagatgtatcaaccatcgctgacccttgcacgaccttaccgtccaggggtatgctttctcccggattaaccacaatgatgtctcctgtctgaacgtcctccggggaaacctgttcgatgctgttctttgttttgagattggcgtaatcaggccgtatgtccattaacacactaattgattttctggaacggctgaccgcggcaccttgaaaaagctcaccgatttgataaaacagcataacggcgacgccctcagggtattgctgaatcagaaaggcgccgattgtggcaagagccattaagaaatgctcatcaaacacctgaccgcggatgatgtttttgactgcgcggatcataatgtcaccgccgatgatcaaataagcagcgaggaaaaggaaaagttcaatggttcccgaatgaaccaaatatgccgctgcgccgagaatgacagccgccgccattctgatcagcatattgaccattctattacgatagccatcatcagctgatttctttttatgcttttggcgaaccgttacatgcggatcaattgatttcacttttttctctactttattcgtgacccattgctcttctttcccatcggctgagacagttaaggtgcttgccgcaaaatttaccgcgcatccgtcaatgccttttatgcctttgactccattttcgattttttgggcacaattgctgcaatccaaaccgtccagaacgtattcctgtttcactagtctcaccttaccttccgatttagggttcccacttcaaagcgtatcaatgagtattgcattctttataatatatatgagcatatactcatataatagttacacctattatatgttgttttccaagaaagtgtcaatgaaaaacaaaaaccggcatatagccggtttttcattttactttttgcagacgaagagcattcagaacaacggaaacggagctgaatgccattgctgctcctgctatccacggtgctaaaaatccaagtgctgcgattgggatgccgaggctgttatagccaagcgcccagaataagttttgtttaatgtttttcattgtcaatctgctcatgcggattgcgtcggcaatgctgttcagatcgccgcgaataagtgtaatgtctgctgtttccatggcaatgtccgttccagttccaatcgccatgccgatgtcagctgtggcaagcgccggcgcatcgttaattccgtcgcctaccattgccgtctggcggccttctttttgtaggcgggcgatttctgctgccttttgttcaggaaggacttccgcaatgatattcgtaattcccgcttccttcgcaatggcttctgcagttctgcgattgtctcctgtcatcatgatgacatcaaggcccaattctttcagacgggcaacagccttccgcgacgtgtccttaatcgtatctgcaaccgctactagcccagctgcttctccatcaatggatacaagcataactgtttttccttctgcctctagctcttccattttggcgagaagagccccatgctcaacctgtttgctctccattaattttcttgtgccgacgaggatgctttttcctccagcttcagccaaaatgcctgcgccgacttttgcttcaaagcgggtaagcttcggtatctcaagccctttatctttcacgccagcaataatcgcttcgccaagcggatgctctgatcccgtttccgctgccgctgcaaattgaagcaaatctttttcttcaaaatggccgaatggaatggcatctgtcagacgcggcttcccgtttgtcacggttccggttttatcaagaacaattgtatcgagacgatgtgttttttctaaatgctcgccgcctttaaataaaatcccgaattcagcagcgcgtccagatccagccattatgctcgtcggagtggcaagaccgagggcgcaaggacaggcaatgacaagaaccgcaatgaacttgctgatcgcttcggcaaaatcgccaggagccgcccaaagataccaaatgagaaaagtgagaacggcaatccccaatacaatgggaacaaaaatacctgaaatctggtcagcgagacgctggatcggcgcttttgacccttgtgcttcctcaacaattttgatgatatgagaaagcgcagtatcctttccgacgttgacagctttaattttcagaaagccgtttgcgttaacggttgaacctgtcacgctgtcaccaggatttttgtcaacaggaagactttctcctgtaatcatcgattcgtcaaccgctgagcggccttcaaccacttctccgtcgacaggaattcgttcgccaggtttgacgtaaacaatgtcattaacaagcacttcgtcgatcgggatgatttgctcctgtccgtctcttacaacagtagctgttttcgcttgaagcttcatcagctttttaatcgcatccgaggaacggccttttgcttttgtttcaaacaacttgcctaataaaatcagcgtcagcaaaatcgcgcttgtttcatagtaaaggccgtctgtatgcccgtgagagccaaggctttgaaaagtaagataaagactataagcgtaagcagccgtcgtaccgagggcgaccaatacatccatattggcgcttttatttctgagcgccttatatgcacccacataaaacggccagccgatcagaaattggactggtgtcgccagcgcaaattgcatccacggattgagaaatatatccggtacccaaatgaatgatgtaaatgtaaaatggctcaccatcgcccaaagcaatggaaatgacaggacagctgaaaaaatcagtctcgccgtttgcttcctttcttctttctttttagcagcagcagcctcactgtcctgttcacccttcaactttagcttatatccaagcttatttaccgcttctttcaaatcgctgacagacgcttctttcggattgtattcgaccgtaactgtttctaaagcgaagtttactggagcatttgcgacgccttctattttgttaagccgtttttcaatccgattggagcaagccgcacaggtcatgccttcaatatcgaattcagctttttctgtaacgacgtgatagcccagcttttctattttttcttgaatcgctgcagtccctgtttcagcaggatcgtagattacatttgatgtttccgtcgccagattaacatttgcatccgtgacaccgggcatccgcttcagtcctttttcaattctggcagcacatgccgcacaggtcataccagagacctgcatcgcgatttccttttgttcactcaacatactcactcctttatatacacctggggggtatataaaaatgaaagaaatatcgcgcctccctataggcgcgataccttgaatcactcagctacgtcatagccctgatcttctatcgcatccgcaatatctttgactgatactttgtcagcatcaaacgaaacatcgactttacccgcttccagattgacatgaacggcactgacgccgtccagttctcctacgcttgtttctactgctttgacgcagtgctgacaagacattccttcaacttgcaatgttttttgttccataatcaattcctcctgtttattctttctattttcatcctaccatacccctgtagggtattacaataaaaaaacgctttatgattttgtgaactttttaaatacgtccaaaagctcagaaatggcctgttccccgtctccgcttttgatggcatctgctacacaatgatgggcatgatcctcaagcaaatgaagcgccacatttttcattgccgcctgaacagctgaaatttgcacaagaatatctacacaatatctgtcgttttccaccatgttttgaatgcctctgacctggccctcaatccgcttaagccggtttgtaatctgatccttttctttcgagcttttatggtttaatgttttatgttcgttatgcttttccatgcgtacacctctgtttaatgatattaattcccattatactgattgtccaaacggttgtctaagcatgccgatccaaaaaatgaatcagttaggttttaccatttgatcaggagggtatatacttctgttgataacgcttttaaaggggagaagaaaagtggacacgatcaaggttggaatattaggatacggattgtccggttctgtttttcacgggccgctgctggatgttctggatgaatatcaaatcagcaaaatcatgacatctcggacagaagaagtgaaacgggactttccagatgctgaggttgtacatgagcttgaggaaatcacaaatgaccctgccattgagcttgtcattgtcaccaccccgagcggccttcattacgagcatgctatggcatgcatacaggccggaaaacatgttgtgatggaaaaaccaatgacagcaacggccgaagagggggaaacattaaaaagggctgccgatgaaaaaggcgtattattaagcgtatatcataaccgacgctgggataacgactttttaacgattaaaaagctgatctctgagggatctcttgaagatatcaatacatatcaagtttcctatgaccgctacagacctgaagttcaagcgcggtggcgggaaaaagaaggcactgccactggtacgctgtatgatctcggctcccacatcatagaccaaaccctgcatttgtttgggatgcctaaagccgtgactgcaaacgtgatggcccagcgggaaaatgctgaaacggttgactattttcatttaaccctggactatggcaagcttcaagccattctatacggaggatcaatcgttccggcaaacggacctcgttatcaaatccatggaaaagattccagctttatcaaatatggaattgacggacaggaagacgcactcagagcgggaagaaaaccagaggatgacagctggggtgcggatgatccggagttttacggacagcttacaaccattcgtggctccgacaaaaaaacagaaacgatcccatcagtaaatggctcctaccttacttattaccgcaaaatagcggaaagcatacgggaaggtgctgcgctgccagtcactgctgaggaaggtattaatgtcatccgcatcattgaagccgcgatgaaaagcagtaaagagaaacgaaccattatgctggagcaataaaacaaaagcctccccaagtaaggggaggctttttcattagaatgtttttcctgcttctttcgcacgcgcaatcgcgtcttctttgatttgctgtgctttatcaggctccgcattatgtccctctacgaaaatgccatcgaaggatggtacgccgaaaaaattcatcatgatgccgatgtagcggtgtcccatttccatctcagccgcagggccttctgaatagtagccgccgcgcgcttggatatgaattgcttttttatcagttaacaagccgacaggaccttgttctgtgtatttgaatgattttcctgcaacagcaacagaatcgagatacgctttcatcactggcgggaatgagaagttccataaaggagtaacaaatacgtacttatcagctgatgcaaattgatcgctaagctctcccaaacggcctactttcgctttttcgctttcagaaagctcttcaaagcctgtacctgactgaagctttccccatccgctaaatacatctgcgtcaatgtgcgggatgttttctttgtacaaatcgatatgtacaacttcatcatttggattcgcttctttgtaagattcgataaatgctttacctgttgccatactgtacgaagttgcttcgtcatgcggatgagcagtgatatataatacttttgccatttttaccagccctttcgtttttaaaaatcacacatcaattattatcatacagatgcataatgattattctgtctctcttagactttattataaagacaaagaaatttactttcaagtaaaatatctcgaattaaagattatttaactttcccaaacagcttacttttcaaaagctgttctcaagccggaatacagcgcggacagttctttactgattcgaggataatgagggacatgcggcacttgaatatccgcaggcatccttttcactataaaggattgctcagccttttcaaaaaacgcccccagctggttgatctcttcatcagaaaacggagcaggcggacggcggtgagcttgggccgaaagcaaatagtaccctaagtgctgagcaccggaaatggcaggccagagcgcatccgcattcgcgtgaggaaactcgccaagcgccttgtcatacgcatcccgaagcctgacaagactcacccttaacttgtgttcgtcggcaatttgcccggttaacagtttctccataaactgcccttccagccggatgacattccgcacaagttctggcagccgcttggttgaaaaccgccgccacaaaagcattgttcccaacagcccgatcacgctgccgacagctacatcagtcagcctcgctatcataaaataaccggcacccgcgccgccatgcatactttctgtgataacaagcgcatttgcggttaaaaagggaacagccagcgcataattgcggacgatcagcatctcaagaagacattgcagcgctgcaatacaaaacgcaatataaacaccgcccagcttaaaaaacaggattgcacctgccagcataacaccgatcaccgttccggccgaacgctgaatagccctgtgaagcgtaaaaacaacagtagtgccaagcatgaccgctgctgccgaaagcggaatccaataggagcgtgcaaagccgaatgcgagggcaaacatatcggcggcaaacagaacaattccgtactttaacgctctaatcaaaactggagacttccagtcaaaagcatttctcaaaaagtaaaaagaggatggcaggcggcttggttccccgtcaagctgcttatcaaaacgtcctgaagcgatatgcaaaacctcattgatttcttcaaacagcttccgcctaggctcagattcgttctcattaatctgaaacgtaccgaaaacccgtgcatgcgcaagcatatctccggtttggcgaagtgccttttcaatctgcgcggtctctctgtccggcgtttcagctgaaaaatgaataatggcaatgaatatgtcgtcagctttttcaagcaggcggaaaaaccgttcatcatgccgcgattttttccgtttattccctttcccaagaaccgtttgtcgggctgttctaagcatgagcaccgtctgatgctgtgcgttatgaaaacctggcgttccgacggctgaaagacatgcagccagctgatgatatgttttttgcagcaccgctccctccggtccatgtttgttccataaccagccgattaaagcgatacccatggcgaaaatgccgccgagaaacgtcagtcccgctctgaacagcgcttgtgaaggatcggccggcagcccggaactgactaaaaaggcaaggacaaaaaacatcggcgcagggccttgaatgccgagcgcgctaaaaataaacatcgccgctgcaccgatcagccccaaaacagccgccatcatccaaagcatcccggacaaaagtgtccctaaaccaaatgagagggcgatcccaatagaaaccaagagcagcttcaaggcgcgctttttgtacgattcaccgcccgcatataaataaacaaagcctccgatacttgcaattaatccgtaatccgtgtgacctgccaatgcaccgaccagcacaggaaaccctgaagcgaaacctgatccgatagcctttttccaaggaaatggatttgcatgaatgcgaaaggcatccttcacgataggcatgattctttgattgttcgcagcagttttgttcatttgacaaaatccttttcaatgaatgtgtagaacttttcccgtttcttcgctttagtatgcccaaaaacgcggttagcttctcaattggtgcgcccgataaaaaaacagagacttataccgtctctgcttcattacatcagtttattataaaagcggcacctgtcaggactgttttgtccttctgccttccttcaagagcaggtgaataaaaaataaaggataaatcaatagatacccattaaacagccaccacacaagatcaaagtcactgctgaatgtccagaatgatagcgcctgcagacctgaacaacaggtcagcacaagagaaatcagcgccatcagcttccagtcagctcgattcacccgctgtaggtacaagctgtacaaccctgtgacagaaatcaggatatccagcggaaaaaaagaccagttccaagcgatcataaacggatggtcatgatgtttaaaagcccagctttccggtatgagagaaaacccggctgacagccagtacaagataaaaccgatatcagtcacgagaaaaaacagcttcatatatctcatttgtactgcccgcttttatgtaccggctcagacaccgcagcatgctcgatcaggtttaaagacacaacaccggcaataatcaaaccaattgaaatgactttcatgacactaacatgttcttgaaaaaacaaaaaaccaatgactgtaatcaggacgattcccatccctgaccatacagcataagcaacagatacatctattgattttagcgtaagcgtcagaaagaaaagactccctccataaaagaaaatcaacagcaaactgggaataagctttgtaaaaccagacgatagcttcatgctgaccgttcccgcaacttcaaacaaaatcgccaagcatagaaacacccaattcatgtcgcatcagcctcctcatcagctgttataccgttaaacaaaacatctacaattgattcaagcacctctcctgtcatgaactgatgtttcagcggatattcagggtcatacacttgattgatgctccctatatacatgtgaacaaacaggtccggattgatgtttctaattctcttttgctgtttgcactcgtctaataattctaggacaatggcccattctgccttaataaacgtgtctaatgtaagccacgcatcgtaatggtatttctttagttcatttaataatcccatgttcagcagttccatcccctgcggaaggctgatcagcatttttttcaccttttcaagcacatttaaactttcattttcatagatgtctctttctatttgcttcatttcagctataaattgttcgacaaccgcctcaacaagctgatctttagatgaataatatgcatagagagtccgcttgctcgttcccagcgctgccgccaaatcattcatcgtaaatgaaaatcctttctgcttgatcagccggaaggtttccgccagaattcttttatccatattaatcccccgctttcggtaccaagaaaactatttcggtaccaatattatacggcagaaatttatggaaagcaacaatatataaaaaaacctctcctattgggagaggtttaaaagacactgcggaccaaaccgccgtccgcccgaagtgccgcgccattgatcgcagaggaaagcggactgcttaaaaatgtaacaaagtgggcgatttcttccggacggatcagtctttgaataatagatgtcggccggttttctttcataaaacgtgcctcagcttcttgaacagtcaggttttcaccaggatacagcgagttcagcatggtttccacaccctctgttaaggtagagcccggcatgacggtgttgactgtgacattcgtgccggttgccagctccgccaaactgcgggaaatggacagctgcatcgtttttgtcgcactgtaatgcgccatttcctgtgacggcataatcgccgcttcactggcaatgaaaatcacacgcccttcctttttctctatcatgttatgcaaatacctgcgtgtcagccttacaccgctcataatattcacttcaaaaaaacgaaaccattcatcgtcgggaatatcaaaatactccgccggttcaaaaatccctaaattgttgaccaaaatatcaacctctggatatgcctgaaacagctcattgcagccttcttctgttcccaaatcaaatgcagccggataaagaaccgcttcagcatgttgtgttttcagttcatctatcgtctgattcactttctcttcccggcgtccgttaatgatcactgccgcaccttcttcagctaacgaagaggcaatagcttttccgatcccagatgtcgaaccggtcaccagtgcggtttttccttgtaaattcagcttcattattcatccctccgtttttgattcctcttatttattgacagaaatctgattggtgaaacatctgctctgcaatcagtatgaaacagctgggattgaaatggaagtacgcactttttggtgcctgtggtttggagaaaaaataaagcagaaccctctaagaggttctgctttattgtcagtatgtatggagacggtgggagtcgaacccacgtccagaaacatcgattacttaagcgtctacgagcgtagcctgcatatttatggtttcactcatcttcttgcctgcgggcgggccttccgagagctagtctgttcatctcttcttacgttctcagacaggaacgcaagcgtagcctacttggatgtgctcttcacagacacataggcaatgtcaggaagagctcgctgcgcttattaggcagctaatgctacgttttggttaaaactgttagttttgccagttatatttaagtgcgtttttacgagatcgcctctcggctcgcagctcaagctcgatccatccctgtcgaatccgtaacgtccccttggtataagggaaatacgggagaaaatatcaagctctcactcaaactggctatagtcttattataacatgatcacggctcttttcaattgtcaaatccttcaaatgaatggcgtcgtgatctgatcgtgaacacagtatagcacaggcctgattttcgaatcaagcactatgcctttagaagcctttttgactgtctctgaacgctctttcgatttcccgcttcgcgtccttgcgcttcaggtcttcccgtttgtcatagttcttcttcccttttccaaggccgagaagcactttcgcaaagccgttttttaaatacagcttcagcggaacgagagaatagcctttttcctttgttaacccgatcagcttattaatctccttgcggtgcattaacagctttcttgtccggagcggatcgtggttatagcggtttccctgctcatatgggctgacgtgcatattgtggagaaacacttctccccgttcgattttggcgaaggaatctttaaggtttacgcggccggcgcgaatcgatttgatttcggttccttgcagaacgatgcctgtttcataggtttcttctataaaataatcgtggttggctttcttattttgagataatacttttcctgacccttttggcatgccagaacctcctctctctaaggaaaaactgtccaccttttgcgatacgctctattttaccaaatgtcacgtaccgctacaatgaaaagctgtttccgaaagaaagcaaatagagcgctgcggccctatttgctggttgagctgctatttcttctttttccgtttctgtttcggagcattctggaagccgcgttttttctttttcttcttcggcttagtgaaccactcccctttttcctcagacggagctggagaaacaggtgtattggtgctttgaacacgttttctggcaggctttccgcgttttctgctccggctgctgtccaattctctcggacgccgcggagtgcccttcatgccgacaatttcaaagtcgatattgcgctcatctttattgacatcgacaaccttgactgtgatttcatccccgatgcggaagacgttgcctgtccgctcgccaatcattgcgaaatgctgttcgtcaaagcggtagtagtcatctgtcataaagctgacatggacgagtccttcaattgtattcggcagctcgacgaacattccgaagtttgtcacagagctgatcatgccgtcaaactcttcaccgattttatcaagcatgtattccgcttttttcaggtcatccgtctcacgctcggcgtcaactgcacggcgctccatagatgatgtatgttcggcgatatccggcaggcgttcagcccacttttcctgtgtcgcttcatcgactttgccgttgatcaaatacgttcggatcagacggtgaacgattaagtccgggtaacggcggatcggcgatgtgaaatgcgtatagaattccgttgacagaccgaagtgccccaagctttgcgggtcgtatttcgcctgtttcatcgaacggagcataacagtagatataaccgtttcctctggtctgtcacgtacagcgtccagaatgctttgcagcgcgcgcggatgaatattccccgccgttcctttcaccacatagccaaatgtcgtcacaaattctaaaaacttttgcagcttttcagcattcggctcttcgtgaatccggtatataaacgggacgttcatccaatggaaatgctccgccactgtttcgtttgccacaagcataaattcttcaatcagcttctcggcgacagagcgttctctgatcacaacgtctttaaccgctccttcgtcatcaacaagcacctttgcttctttgaaatcaaagtcaacggcgccgcggtccatccgcttatcgcgaagaatttgagccaggcgctccatgtctttgaacatcggaacaagaggctcgtatttttgcttcagctcttcatcatcatcaacaagaattttattcacatctgaatatgtcattctttccgttgttttgatgacactttggaagatctcgtgctctgtcacctgtccctgactgttaattgtcatttcacaagaaagcgtcaggcggtcaacctttggatttaaggagcagatgccgtttgacaatctgtgcggaatcatcgggatgacacggtcaaccagatacacacttgtccctctttcaagcgcttctttgtcaatcggcgagttttcggttacgtaatggctgacatcagctatgtgaacgccaagcttgtagcttccatcatcaagtttcgtcacggtaactgcatcatccaaatccttcgcatccgcaccatcaatggtgacaatcacctggtcacggagatcacggcggtctttcagatctttttcatcaatcgtgtcaggcgtacttgatgcctgttccatcgcgtcagctggaaattctcccggcaggccgtgcttatgaatgaccgataaaatatcaatgcctgggtcgtttttgtggccgagaatggtttcaacctcaccctctgcgttcatgcggccttcaggatagctcgtcagcttgacaacaaccttatgcccttccgcagctccatttttcccatttttcggaatgaagatgtcactcgtgatttttttgtcgtccggaatgacaaagccgaagtttctcgtttctgtatacgtgccgacaacccgctgaatcgctctttctaaaatccgtatgacggttccttcctgcctggagccgcttgactgtgaatttagacgcaccatgacgatatcgccgttcattgccgtatttagctcattaggcggaataaacacatcacttaacgacgtatcctcaggcagcaaaaaggcgaatcctttcgcatgggctgaaatctttccttttattaagttcatcttctccggaatgccgtagcggtcgcttctcgtccgtacgataagccctttttcttccaaggcgactaacgctttgacgagctctttaaactcctcggcttccgtaatatttaacatctcctcaagttcctgaacggtcagaggtttgtacgcctcttccttcataaacgagagaagcttttccataaatgcttctttttccattatccgacctcctgttgattaccaatcgagcttctctaaaaattcatacacatcctgatggacgaggtcacgttctttgtcgagtgtaatgacatgccctgattcctcgtaccatttcagctgtttatcatcagtttccacttcgttgtaaataatattggcgctttcggtattaatcatgtggtcatgacgggcctgcaccacaaatgtcggtgaataaatcatatcgacattattccgcacatcagcaattaagtcttgtagcgccttgagggtattcatcggcgttttttcgaattctttcatttcctcttcaatttgctccgggcttttcccctcaaactttttgtaattgcgagcgtatgaaagaacgccttgatacatgacctcttcactcttaatatgcatcggtgcgcacattgggacaattccctttatgggtacagtgtaacccaatttcagcgaaaaaaccccgccaagcgacagtccgcaggcagcaatgctctcatagccttcagattttaagtattcatagccatccattacgtttttccaccagtcttcgggccccgtatgtacaagttcttcaggcgggacgccatgtccttcatattgaggcgcgtggcacgtatagccgcgttcattcaaatatcgtcccagcatccttacatccgctgtattgcctgtaaagccgtgcagcaaaagcaccgctttgtctccgcctttaaatgtaaatggttttggtgtcacaactttcatgctcatgtctccctttctatctgcacgatcattttagttttccacagtttaatcagaaaaaaacgttttgaatatcatccagaaacgtgaaaaaggcctgacttcacatcagaccttatacaaacattgccctataggatataagcaagcgcaatcgttaacacgaaaaacaagactgccagcactaccgtaatgcggtgcaaaattaaatcaagacctcttgctttttgtttcccgaagagctgctccgctccgcctgaaatcgcaccagataatccggcgcttttactggattgaagcaaaacgacaataataagtgcaatgctgacgataaccaataaggtaatcaaaactgcgtgcatcccatacacctccagactcactggctacattacttctattttacatgaaaagggttggcatgtcacgctgtatcagacgccaaaaggccggataagacgttttatcttggttaccctattcatatgaaaaggacaaaggagaaaagcgatgccgcttatcagcatagacagcaggaaacatcttttttatgaagaatatggacagggaatccctatcatttttatccacccgccgggcatgggacgcaaggttttttattatcagcgccttctatccaagcatttcagggtgatttttcccgatttaagcggccacggtgatagtgatcatatcgatcagccagcgtctatttcctattacgcaaacgagatcgcgcaattcatggacgctttggatattgataaagctgtgttattcgggtattctgccggaggcttaatcgcgcagcataccggcttcacccgccccgacaaagtgtcacaccttattctgtccggcgcctaccccgctgttcataacgtaatcggccagaagctgcacaaactgggaatgtatctgcttgaaaaaaaccccggtttgctcatgaaaatcctcgctggcagccacacaaaagacagacagcttcgcagcatattaacagaccatatgaaaaaagcagacctggcccattggcatcagtattatctggattcgcttggctacagctgcattgaacagctgccccgcctagaaatgccaatgctgtttatgtatggcggcctgcgggactggacctttacaaacgcaggctattaccgaagatcgtgcagacatgccgaatttttcagattggaatatcagggacatcaattgccgacaaaacaatggaaaacgtgcaatgagctggtgacacggtttgtgctgacacatcattcaatatagaaaacgttggatctccttgcgttttctatattttattgacttttgtcaacaaaatcatagtaaaaaagatcctcaaatttcaaattaaaatagtgaagcattttaccgatcacaagctgccccggccgtctttctccattcagcacgcggctcagtgtggcgggtgagactccgatttccagcgcaagctgattaagggaataatcgttattaaccatatactgcaagacataatcacgtctaatctgtatcttttctactggcactttcctcaccttccattcctgaaaaacttttttctatacttttacattacggcttatgttaacttttgtcaatacatttccagtctacctattccctttagtcaataaacatactaaaatatgagtaacagtgagggacggggtgagatatatggaaagctttggcgaacaattacgggcattgcgtgaagagagaaagttaacagtcaaccagctggcgacttattcaggcgtaagcgcggccggcatctccagaatcgaaaacggaaaacggggcgttcccaaacctgccaccatcaaaaaactggcagaggccttaaaaattccttatgaggggcttatgtacaaggctggttacatcgaagaagtgcatgaagccagggccccttacgaaacgaagtgcaagctgcttgaaaaagcggaggcctatgacctgaaaaaccttgcgcttcttgagaacgaaaagtggcaatatctcaataaagaagatttgctcatgctggatcattatttttcgtttatttcagacgaagccaaaaaacggtctgctgatgactgactcttgatagaaatgtgaggcgatagaccatgtcaccgttcggacagcaattacgggagctgcgccgcgcccgcaaactgacagtgaatcagcttgcggtgtactcaggcatcagctcggccaccatttcaaaaattgaaaacggcaaacgcgggacgccaaaacccgccacgattaaaaaactggcagccgtcctgaaagtgccgtacgaaaacctaatggccgccgcaggccatattcaggcctttcctgaagaaatccgcgaagcatctgaaagctatcaatccgtttatgaaatttaccagacggctgtcactcgcggagcggagcacctcccgattttcaatagtcaaaaatgggaacatctctcaaagcaggatattgaaaatctcagcaaatacttcgattttttgtcttcagaagcaaaaaaacgcgcctcttcctcataatcccctgtttctctttctatattttatcaatcacgcttgcataccctccctcgttatttgcgttataatagtgacagacgaggtgaaaagtatgaaccaatcagaaatgtgtcctagatttgaaaaagcagtcgacatcttaagtaaacgctgggtcgctttaatcgtatttcagctcttgaacgggtctcagcgatttagcgaaattgaagcagcacttccaaatctaagcggcagagttctgtcagaacggctgaaagaacttgagcttgaaggagtagtgaagcgggatgtcatccctgaaactccggttcgcatcgaatattcattgactgataaaggaaaggcactagcacccattttaggtgagatttctaaatgggcgactgaatggattgacccttcctttcttgactaattgctaaaacggctctgatctcaaagatgagaaaagagccgttttttattttttcccaggtgaaaaaacgatttctcagccgatatatagtacatccacacattacgtttttaaaggagaccactatatgcgactgacgatttcccgcaaattcagcctggtatttttgacactgatcctgatcaatttacttgtaggcggaataggcgttcttaatatgcagcatatcattcaaaaaacagatgaaatcaacacaaaatggattgacggcatcaaaggaatcacttcaattaattatgtaaccgagcacctgtcttctaaagaaaaggactttctgatttatacagacaaaagcaaaatggatacacttgatcaagaaatgaatcaaatcatggaagacattaaccaaaagctcgataactacgaaaaaacgatctccactgataaagagcagaaactgttcgagcagcttcaaactgaagtgaatacctatatggatattcatgcgcaaattatcgaaagcggccgcacgaatgacatggacaaagcaagaggtttattggttcagactgaggccagctttgaggatatgaaaaaaacaatcactcagcttgttgacttaaatcaagaaggcagcaacacagcggtaaaagaaacgaaggccgtctatcataaagggctcatttacactgctttgcttgtggcagcttcgatcctcatcagcattttcatctggctttatatcacgcgaaacattgtaaagcctatcattcgcatgaaggaatctgccaatcatattgccgaaggcgatctgtcgaacgatatggagccgctcaactcaaaagacgagctgggtgatctgaatgaagcgctgcaaaaaatggtagggaatctgagagatattgtcggatattctaaagacatatcaagccgggttctttcttcttcacaggtgcttgcaaccgcaacgaatgaaacaagatccggcagcaaacatattaccgagacgatgaacgaaatggctgagggctctgaacagcaggcccaagacgccgtgacgattgccgaatcgatgaatgagttcactgaaagcattgataaagcctataatcacggcatcaccatcagcgatacgtctcaaaacgttctcgaactcgcggtaagcggaaacgaaaatatggctacgtcattacagcaaatgaaaaccatccatcatattgttgaagaagccgtgcataaagtgagatcactggaacagcattctcaggatatcaacaagctcgttcaagtcatcaacggaattgccgagcaaacgaatttgctgtcccttaacgccgcaattgaagctgcccgcgcaggagaaagcggcaaaggcttcgccgttgtggctgatgaagtcagaaagctggctgacggcgtttctgattccgtgcaggacattacccggattgtaaacgggacacagcaggagatccacactgtcattacgtacttggaaagcagctttacagaagtcgaaaaaggaacggaaaacctgacagacaccggacaggctatgcagcatatcaaacaatccgtcacccatgttgcagacagcattaaggaagtaacggatggcctgaagcagttaacaaaccaatcgattaccatcaatcaatcgattgaaaatatcgcttctgtatccgaagagtctgccgccggcattgaagaaacattttcaattaccgagcaatccgcccattcgatggatcaagtgcttctaaatgctgaagagcttgagcagctggccaatgagcttaatgagaagatgggtcagtttacgatttaaatagaaaaaagaggctggactccagcctctttttctattctatgcagctgattgaacatgtttcgccccggttctttttttcttcaccggacttaatgcccgctccagccaagccatgagcaaatccgcccctaccgccatcaccgcagttggtatcgctccggctagaataatcgcagttccgtttgttgcgtttgagccgcggacaatcatgtccccaaggcctccggcaccgacaaatgtgccgatcgctgtaattccgatggcaatgacgagagccgtgcgaaggcccgccataatgacagaaagtgcgagcgggagctcaaccattctgagtacttggaatttcgtcatgcccattgcttttcccgattctaagtaggcatgttcaatactgataatgcctgtgtacgtgtttcgaataatcggcagcagggaatacagaaataatgatagaatcacggtatttgcgccgagccccataacaagcattaagacggccagcatagcgagcgccgggattgtttgaataacgtttgttacggcaaacacccaggctgacaaacggcgaaaatgcgcgatgaggattccggccggaaccccgacgacagcggcaaataaaacgccgtaagccgacatgagaaagtggcggccgaattcatccatgacgtaactgccattctgcgcgtaatacgtcattaactgttcaagcacgttcattgacctcttccccctttcacgattcgaagtagtgatgtttttctaaatattccttggcaacgacagacggttctttgagattgccgtcgacttcatagttaagctcctgcatcgtggttgtgtcgatttttccgagcattttcttgatgatgccttcaagctcaggatgttctttgagcaccttttccggaacaaccggagagcagtcgtacggcgggaaaaattgtttatcatcctttagcattttgagaccataggacttgattcttccatcggttgaatacgcaagcacaatgtccatttttccgcttttcaccgcgtcgtacacaaggccgatctgcatcggatacgtgccgccgaatgtcatgccgtaggttttcgtaaaatcctgatagccgtttcctttgagcttcatccaatagttatcaacgcccagctttaattgcggcgcccattttttaacgtctgatacggtctctaaatggtattggtcggccagttccttgctgactgtaaaggcatatgtattatcaaacccgtaggagttataccattttaaattgtatctttttttaaactcccgctgagtaagcgccagcgctttgtccggatctttttcaggttccattctcaacgtgcctgtcagcgcgtctcccgtatatcttgtggccgcaatgtcaatttccccgttcattaaagcctgctgctgcaccgcgttggagccaagatttttaatcgttgttgttttgagatcagtatggtgttcgatcaactggccaagcatactagcgatgatttctgattcgctcatgctttgcgcgccgattttaatggtctggtctgcagcagcgctgagaccaggaagcgaacagccgctcagcgtcagcgttgccgcaagtgctaaacctatgattaatttgaggtattttcttttcatgagccccctccttatgacaattcattcaatctctgcatgccggcaggtgtcagttttcgttcagcaactgcaagcacataatcaatcacaattgccaatatcgtgacaggtaccgcgcccccgatgatatattccggctgatataaattcagtccgataaaaatgtaatcacccaatccgccgcctccgataaaggaagcaagcgtggcccagccgattaagtaaatcgtcgatgtcctgattcccgccatgatcactggcgcggcaagcggcagctccaccaagcggacttgttcagccggcgtcattccgattcctttaccagactcgagcagatttttgttgacgccgcgaatgccggtatacgtgttgcgaagaatcggcaatacggaatagaaaaacaaagccacaatggccggaaccttccctacaccaaggagcgggataaaaaaagcgaggatggccagactcggcagcgtctgaataatattgacaatgccgataatggtgccggctccttttttcattctggtaagcacaaccccgagggggacggcaaccagcacgcctaagatcacagcaatgagcgatatcgtaatatgctcgtatgttttataaagaagctcgcccccattggtttgcaaaaattgaacaatatgatgcatgacttatcgcccctccctatgacaatgctgcgagctgcttttcttctccccagagggagtcatacacgatgtcgaccagacttgccctcgtcacaattccgatcaggcgtcggtcttcatccacaacgggaacatatttgacaccccgttttaaaattttgcggaccgtgtcgcgcagcagtgtgccgcccagtactgtgtatatatcttcatgtaaaacttcactgacgagattggcctttttccggcattgatcaatgatttcaacatcgacatagccttgcagaccgcgctcgtcatcgacgaccagcaatgaatcgacccgttcctgcctcatcagctgaatggcctcagaaagcgttttatccgcggtgatcgttacaggctgtgtgttcataatctggtcaacccgttcaacatccgggctggatgactgaatcagccgctccttgccgataaattcctcaacaaattcgtctgccggatttcttaaaatgtcatcgggcgttccaacttgaacgatttctcccgcttttaaaatcacaatccggtctgccagcttaatcgcttcatccatatcgtgggtaacaaatacgatggttttatgtaaggttttttgcagttttttaaattcttcctggagggaatccctcgtaatcgggtcgagtgccccaaacggttcatccattaagataagcggcggctccgcggcaagtgcccgtaatacaccaattcgctgctgctgccccccgcttaattcatgagggtaacggtctacatattcaggccccatatcgaccaattttaaaagctcacgcgcccgctctttccgctgctgctccggccatttcagcagttttgggacgagtgagatattctgctgaatggtcatatggggaaacaggccgatctgctgaatcacatagccaattttgcgcctgagctctacaggatcctggtccatgatgttttcgccgtcaatgaaaatcttcccggcggaaggctcaattaatcggttaatcattttcattgttgttgtttttccgcagccgctcggcccgataaagcagataaattcgccttttgcaatcttaagatttacgttgttcacggcttttttgccgcccttgtatgttttcgagacattttctaatgtcagcaaacatcgcacctccaaaattaagtttattcaatttgttcagtttaaatttaatttttcagacaattgaatgcttcccattatagaataaagtttataaaataaaaagtttacaatttgttcatattatttataaagtatgtgtaaacgctgatttacccgcattgacgtgtgttgatctccttattgctccaatttcctgccaaattctcttttgacagcattttcgccgtatcaaaaatgtggtatattgacatcggaattgttagctgaaaggatgaaaccgttggagaaagatccgttaacgatcattgaacaagccgaggaccattttatagaaaaaatcgcggaaaacatgcatgcatttggaatgccctctaccgtcggacgagtgctgggcattatttatatgaatcgaaaaccgatgacgcttacggaattatctgaggccaccggcatgagcaaaacacgcatgagccaggtagtgcgggaaatgcttgatgccaacattgccgagaaggtgttcgaaaaaggcgtgcgaaaagatttatatgaggttgagcaggactactatcaaacatttatcacgctgttttcagccacctggagcaaagtcgtcagcaaaaacaaaatgatgcataaaaaactcaatcgggagctgcttagcgtgttggatgaagagcttactcctgaagcggaagaaaaagtgaatgagctgctgaaggaattaaaggaatggctcgattattataattggctcagccgtttgattgagttttttgagagcgaagaaatttttaaatatgtgccgaagccgtaaaaaacgccctgtcattacaaggcgttttttcttatgcggcacctgccaggtttttcttttttctctttttaatcgggcttaatgctcgttcaagccagcccatgaccaaatcggcaatcaccgccatcagagctgtggggatcgctcccgctaatataatcgcggttccgtttgtggcgtttgatcccctgacgatgatgtccccgagaccgcctgcaccgacaaatgtcccgatggccgtaatgccgatggcaatgacaagcgcggtgcgcaggccggccattatgaccgaaagcgcaagcggaagctcgaccatccgcagcacttgaaattttgtcatccccattgcttttccggattcaagataggcgtgctcaatactgataatccctgtatacgtatttctgataatcggcagaagagaatacagaaataatgacaatatcactgtattagcgcccagccccatgacaagcatcagcacggcaagcatggcgagagccgggatcgtctgaatgacgttcgtgaccgcaaaaacccatccgcttaatcttctgtatctggctatcaggatgccgagcggaattccaacaatggcggcaaataaaacgccgtataccgacatcagaaaatggcggtaaaactcctgcagcacataaccgccgttttgcgaatagtatgtgccaagctgctgtagtacttccatatgatccacctcttttcttagtcaaaataatgatgtttctctaaaaattcctttgctacgacagacggctccttcagcttgccatccacttcataattaagttcctgcatcgtttccgtgtcgatttgcccaatcagcttattgatcacaccttcaagctccggatgcgccttaagcaccttttccggaatcaccggtgaacagtcatacggcgggaagaaacgcttatcatcttttaagattttcaagtcataggctttaatccgtccatccgttgaataagccagaacggcgtccattttcccgtttttgactgcgtcatagacaagcccgatctgcattggataagttgtgccgaattcaaagccatatgtgctgacaaagcctttatacccgtcaccttttcgtttcagccaagcattgtcgacgcctaatttatattgggaggcattttttttcaggtcggacacggtgttaatatgctcattttccgcaaacttttttgttacggtgaaggcatacgtgttatcaaagccgtaggaatcaaaccatttataagaaaagcgcttttgaaactcgttctgcacaatgttcagcgctttttttggatctttctccgcttccttgccgagggtgcttgttaaatctgttccggaatagcgcgtggctgaaatatcaatgtcaccgcccagcatcgcttggtgctgaacatagtttgagccgaggtttttcactaaagcggtattcaaatctgtatcatgttcaataagctgcgcgatcatattcgctaaaatttctgattctgtcatgctttgcgccccgattttgatcgtgtcgtcagaagcgccgccgagacccggcagagagcagccgcctagcagcatgacaaagacgagagcaaacgcgccaagccatttgatttttgtcgttttcaacagagccaactccttacgaaacttccttcatcccttgtaatcctttcggcgtcacctttcgttctgtcacggctaggacataatcaatgataattgccagaattgtgacaggcacggcaccgccaatgatatattcaggctggtataggttcaggccgataaaaatatagtccccgaggccgcctcccccgataaacgacgcaagtgtcgcccagccaattaggtagatcgttgatgtgcggatccccgccatgatgatgggaattgccagcggaatttcaacgagccgaatctgctcccagcctgtcatgccaatccctttccccgattccaggaggtttttatttacacctttaatgccggtatacgtattgcgcaagatcggcagtaccgaatagaaaaataaagcgacaatcgcaggcacttttcctacgccgagaagcggaataaaaaaggctaaaatcgccagactcggcagggtttgcacaatgtttacgaaaccgataaccgcacctgcgccttttttcattctggtaagagcaacgccgagcggcactgcaacgataatgcccaatacaacggctatgagtgaaatatataaatgctctcctgttttatacagcagctctccgccgttcgtttgcaaaaaagtcatcatttgattcatcttaaaagagctcctcccctggtcagatcgtcatgagctggttttcctcgtcgccccaaatggaatcgtacacgatatcaacaaggctcgctcttgtcacaatccctgctaaatggttctgttcatcgacgaccggaacatacttgatcccctgcttcaaaatttttcggactgtatcgcgaagtagcgcccctttttgaacggtatatatatctgagcggtatacatcgccaacgatgctcgcttttttgcggttttgatcaatcatttccacatcaacatagcccttcagcacgttttgccggtccacaacgagcagcgagtcaacacgtttttctctcatcagctgaatcgcctgagaaagcgttttgtccgcagataccgtcaccggcgttctgttcatcatttgctctacccgctcgatatccggtcttgactgaatcaggcgctctttcccgataaattcttcaacaaactcatttgccgggtttcgaagaatctcatcaggtgtgccgacttgaacgatttctcccgcttttaatatcacaatcctgtcggcaagcttaatcgcttcatccatatcgtgggttacaaacacaatcgttttgtttaaggttctctgcagttttttgaattcttcctgaagggaatcacgcgtaatcggatcaagcgctccgaacggttcatccattaaaatgagagggggttccgctgccagggcgcgcagcacgccgattctctgctgctgtccgccgctgagctcatgcggataacggtctaaatactctgggcccatatccacaagctttaacagctcgcgcgcccgttctttccgtttttcctcaggccatttcagcagctttggtacgagtgagatgttctgctggatggtcatatgggggaacaaaccaatctgctgaatcacatagccgatttttctcctcagctcaaccgggtcctgttccataatattttctccgtcgataaagatccttccagacgatggttctatcagtctgttgatcatcttcatcgttgtcgtttttccgcagccgctcgggccgataaaacagataaattcaccttttgcaatatctaaatcaatgctgttcacagcttttttgccgcctttatatacttttgacacttgttccaatttcagcaatccgtgcacctccgcaggtttcctttaaattttctgaaaagtataatccttattatagtttgaactttgtaaaataaaaagtttacaatgtgttgaaattatatgttatttatagattatttattgttatgaccgagacggaaagggtgttcttacaattacgccggatacctcccacttcctctgcattcagctattttcaacaccaggaagaaatatgatatattgacaccatcaattgccatttgaagggatgatcagctgtgaaaaaaaccgctctcgacatcattgaacatgctgaagagcatctcattgagaagattgccgaaaatatgcatacgtttggaatgccttcaactgtcggacgtgtgctcggaattatttatatgaatcgaaaaccaatgaccttaagcgagctctctgaggcaacgggcatgagcaaaacacggatgagccaggttgtccgggaaatgatcgatgccaatatcgccgaaaaggtgtttgaaaaaggcgtacgaaaagacctttatgacgtcgagcaggattattatcaaaccttcatttctttatttgcggcgaattggacaaaggtcgtgagcaaaaacaaagtgctgtataaaaaattaaaccgggagctgagtgatcttttacaaagggacgggcttaccccggaagcggaagagaaagtcaatcagctgctgaatgaattaaaagaatggcttcattactatgattggctgagcaggttgattgaattttttgagagtgaggaagtctttcggtacgtgccaaaaacaaaagaaagcagctctctaaaataagggagctgctttttgcatcatgaggttaagatcggaaacatgcctttcagccccgcaccaatcatcccgaccgcaaccacggctaagattaatcccatcagtctggtaatcacattcatctcggtttttccgagtttgctgctgataaaagcagaatagtggaaaaagagaaaggtcagggcaataacggcggctatgccgatcgtgacagccgcataatgaccaatgccgctatgaccggcggaaaggctcatcactgttgcaatcgttccgggcccagcaatgatcggaatggataaaggtgtgactgatatatccgctttttccttgctttccttatgttcatcatggtgaagagattgcacgtgtgattctttcgcattcaatagattataggcaatgccgaaaatgaatatgccgcccgccactcggagcgcgtaaatgttgatatcaaacagtttaaagataagatgaccgaaaaccaaaaaagctgcgagaataaaaaaggataaaatagctgccttccgggcaatcgcttttctttccgctgcagtatagccttctgtcagcgtcagaaatatcggtacgtttccgatcggattcgatactgcgaataaaaaatgaagacgtgaacgataaatgagaacatcatatacctccttgttgatagtctctgcacaggaaatagaattattctccacccttttacccggaggcgatttcccggtaaacctttatagcctgtcagaaacgcgccatgctacaatgaagtgacaaattgaataggaaggacgtatacagatgttcaaaaaaattgcggcagatgccttgggcttatctgatatcggaaaaattatcgtacctcaggactatgacaaaacagacgcagacgactatgtcatgcatgaagataatgagaaaatttatttcttgattaaaacaaaagcagacgagtattgctttacgaacctggccctgatccatgtagacggcgaacgcgccacttcctcgaaacgaacgttgaaacgctatccttattcgcaatataaaatctctgacgtttttcttgaaactgccggaaaagtggatttggatgttgaaattaagttcaagctgggcggtgaacaattcgacattgatgtccacaaagaccagattgaaaagttaaaagacctttataaagcactgcttcgcatcgctgaaacaacctatgaaaatgacattttaatcaatcaagcggagcaaagcttagataaagcagtgacgattcttcaccatacccgccctgagcacgtcaatattgaaacgcaatacaaagagctgaccgaattcggattcacttggctgacatccgttcgctcgcagtatcatattaaggattttggggatgtatttgagaaatatattaataactagataaaagaagacacagctgctatcgtgctcgtgtctttttttgtatgaatattgattactttacaacttttttcttttataataaaactattagtctattttccctatattacagataaaggagttattttatgtattgtcctcaatgcggccatcaaacagatggcggaaatttttgtgagaaatgcggatcaccgctccccggtcaatcaggccaccagcatgcagctcaaactggagccgctgcaaagcaagcagcaaaacagttcggttcatttgtcttatccgtcctgaaacgcccttatcaggaatgtaaagcaacaggcggagaacagctgatcagcgcaatcattacgatcgttcttttcagtttgctgacccctttgatgttttatattcttttttcagacggtcccgaaagcgtaagctttacagcaatcttcttagagccaaccatttattttattttatttctatttggcctgcatgcatgcatctttttcgccctgaaaatcgcgggaaaccaagtatctttcaaggattcattctcaagattcggagcgtttctcataccgtttacggctattttgattcttgcccttttcttctttttattacatacagacatttgctttaccatattagccgttggtttaatcggtgcattcttcgccattcctcctgcgatgctgagcagttaccagcattcatataaagggaaggttgatgtcatttactcaacgattgtaatttatctgatcatctgcgttacatttcagcttattatcgaacactatgtcaaagaaattttccgttatatgctcttttaaaaacaatcccatcacctgctggtgatgggattgttttattgaatagacgttaagtaaattcttccgttcttcactacgccggtgtaggtccagttatatgttctgagctttggactgccgcctgattttgtgatatagaattcttcatacgtcttaatcgtgatagccgacccattttggctccagcttttcacttcatagttattaaagtcttctgttgtcccctctttatttaatttcgacacgagatgctgctggtcggaataaagggaactgcctttttcaaggctgtcttccatcagtgagaaattattttgattcacggcatctgcctgactttgcagataactgcccataaataatgtcacttgttcatctgtaacatcgccgcttgcagagctttcactgcctttgtttttcgagccagcccaggcggaagtgtatgtctctggtttatcatttttgattttctttatatttgtgcctgcagattcgaatgttgattctgcatcttcgaaaatccactttttctgttttttatcatatgaaagaagatattcataactcggactgtcgtcagtcatttcagattttgtatagtcgttatacgaagaagactggtgaagttcttttcctgttaccgatacctgccacgttccgtcgtttttctgagagagggcaaatgtgtccaggtcaaaatcagtttccaagtatctatcttttaagtatgaatccgcgcttttcatagaatcgacggtgtccttcgtctccgccttccaattggcacttgcctctgtcatctgggctgtattcccatcagatagagctttggagtattgttttgttgttttgacaattgtgttcataatctgttcctgtgtatcttgatcaggaattaacgttaactccatttctttatcatcgatcggaacgccggcagtttttgtttttccccacggaaattctgcctcgactgaagctgtcattgatccatctgtcagcagcggaccatatgttacggatttgaacggatctttatgaattgacttgccgttaatcagcaaatctcccttcccgctcttgatgtcatccgctaagctgaatgtcacatcgtctgcttccaatgagagatcaacacgaaagctgctatcgccaatcgcctgaatgtcttcctttttcacaaggtcaacgacatcgtttttcagtttggctgagactgtatattcgccgggaatgtacggaccaagggtttgtgcttgatctgctttctttacagatccggcttcctctttattgacatatagatcggtatttttataattgctgctcacttcaaaataaacaggtgctacctttaagtcataatggtcaaataccagcaggcttttcccgtctttttctgcatatacgatatccttctgggctgtttcatcccgcagcgatgcaaaaagttcatcttttttgtctggatgatccttcaaatatgtaagaaacggttttacattatttttagtgagtttaagattgtcatttaccggtgtaagcagagtcgcgatttggtcctgatccccatcatttacggcctgttcaaacttgtctactaacctatcctttgaagtaaaatacgctccggttttatatgcggcgaataatataacgcacgccgcggcaatgctgctccataaaatgatggttttcttagggatcggttttcgcggagcctgccttgtttctgcagtgctagctgtttcttgatttgcctgtttgctaccccctccgatcggggtgccgcattgtttacaaaacttggctccttcattattctgggagccgcaattcttacaaaaaaacatgactttcctcctattctactaatttgataacatttactgcttttcatattttataataaaacagaatgaaattgggaacgaatgaaaaaattaaatgtctatcagactaaaaaggtggtacgaatatgcaaaagctcaggattgaattaggagaagaaacaaatgacgaactatatgatctattgctgctcgccgatccatcgaaagacattgtagatgaatatcttgagaggggagaatgttacacagcttgggccggtgatgagcttgcaggggtttatgtattgctaaaaacaaggccgcaaacagttgaaattgtaaatattgcggtaaaagaatctcttcagaagaaaggctttggcaaacagcttgtacttgacgccatcgaaaaagcgaagaagctgggggcggacacgattgaaatcggaacggggaattcgagcattcatcagctttccctctatcaaaaatgcggattccgcattcaggcgatcgaccacgatttctttctcagacattatgatgaggacatttttgaaaacgggattcaatgccgcgatatggtaaggctttatttggatctctgaaagcataaaaaagccgccgagagaaaatcccggcggtctttttattacttgtttaagttgtagaaagagttgataccgtggtattgagcagtttcagccaactgatcttcgatgcgaagaagctggttgtatttcgcaacacggtccgtacgagacggagcacctgttttgatttgtcctgcgtttgttgccacagcgatgtcagcgattgtgctgtcttcagtttcaccagaacggtgagagataacagctgtgtagcctgcgcgtttcgccatttcgatcgcatcgaatgtttcagtcaatgtaccgatttggtttactttgatcaggatagagttgcctacgccgtttttaataccttcagaaagttttttcgtgtttgtaacgaagaggtcgtcaccaacaagctgaacttttttgccaagacgctcagtaagaagcttgtggccttcccagtcgttttcgtcaagtccgtcttcgatcgagatgattgggtatttagaaacaagctcttcataccagtcaaccatttcagcagatgttttcacaacgccttcgccagacagatggtatttgccgtcttctttgttgtagaactcagaagatgcagcatccatagcaagtttaacttcttcgccaggtttgaagccggctttttcgattgcttcaacgattgtttgaagcgcttcttcgttagaaccaaggtttggagcgaatccgccttcgtcacctacagcagtgtttaagccttttgcgcttaatactgatttcaggctgtggaagatttgagcgcccatgcgaagtgcttcacggaagttaggagcacctacaggcatgatcatgaattcttgaatatccacgttgttatcagcatgctctccgccgtttacgatgttcatcatcggtacaggaagcgtttttgagttgaatcctccaaggtattggtaaagaggaatctgtaagaaatcagcagcagcacgcgcacaagccatagatacgccaaggattgcgttcgcaccaagtttacctttgttttcagtaccgtcaagctcgattaaaagctgatcgattgcgttttgttcagttacatcaaagccaagaagctctggagcaatgatttcgtttacgttgttaacagctgttaacacgccttttccaaggtaacggtctttgtcgccgtcacgaagctcaaccgcttcgtattcacctgtagaagctccgcttggcactaatgcgcggccgaaagctcctgtttctgtatatacttcaacttcaactgttgggttgccgcgggagtctaatacttcgcgtgcataaacatcaacaatgtatggcatgagttttgtctctccttttgattttcaaattatttttgaattaaagatgttcctgtcatttctttcggtttttcaacaccaagaaggtctaataacgttggtgcaaggtcgcctaggattccgccttcacgcagcgtaatgccttctttcgttacaatcacagggactgggtttgttgtatgcgcagtgtgcggttcgcctgattctgtaatcagaatgtcagcattaccgtgatcagcggtaatgatagcgtgtccgcctttagcaaggatcgcgtcaacgacttcgcccaagcattcgtccactgcttcaattgctttaattgttggttcaaccattccggagtggccgaccatatcagggtttgcgaagttaagaatgatcgcgtcatgcttgtcagcttcaatttctttgacaagcgcgtctttcacttcatacgcactcatctcaggcttcaagtcatacgttgcaactttaggcgagttgatgagaatacgctcttcacccgggaattcagcttcacggccgccgctcataaagaacgtgacgtgcggatacttttcagtttctgcaattcgaagctgttttaacccgtgctgagataatacttctccgactgtgttatcaagatttatcggtttaaacgctacatagccgtcaactgtttcactgaagtgagtcaggcagacgaaatacaggttctttggataattctcgccgcggtcgaagtcacggaagtctttgtttgtgaacgtgttggaaatctggatggcgcggtccggtctgaaattatagaaaatcacagaatcgccgtcttggattttcgcaacaggctcaccgttttcttttgtgatgacagatggaatcacgaattcatcgtagataccatttgcatatgaatcatcaacaacatccagggcgctgcggtaagatgggccttcgccgtacgccattgcgcggtacgctttttctacacggtcccagcgtttgtcgcggtccatagagtagtaacgtccggaaatgctggcgatttcacctacaccgatttccttgatttgatcgttcaactggttgatgtacgttttcgctgtctgcggacctacatcacggccgtcaaggaagccatggatataaacctctgtcagcccttcttttttcgcaagctttaacagtgcgaataaatgattgatatggctgtgcacgcctccgtcagataaaagaccgaacaggtgcaaggctttgttgttttctttcgcgttgctgatcgcgtcaaggaatgtttgattgcgttcgaactctccttcgcgaatggcaacatttacgcgtgttaagctttggtacacaatacgtcccgcaccgatatttaagtgacctacttcggagttccccatttgcccttcaggaagacctacagcctcgcctgaagcagtcaatgtttgatgaggatactggttccaatagcggtcaaaattcggttttttcgctaaagcgactgcgttccctactgtttcgttacgtaatccgaacccatcaagaatgatgagtgcagctggttttttactcatattgaccttcctccaataattgaacgaatgactgtggctcaaggctcgcgccgccgaccaaagcaccgtcaatatcggactctgccatatattctttaatgtttgcaggctttacgcttccgccatattggatgcgaagcttgtctgcagcttcttggctgaagctttcagcgacggttttacggatatgcgcacacacgtcattcgcatctttcgctgtagaagatttgcctgttccgattgcccagattggctcatacgcaataacagaagcagcaacttgttcttcagaaagaccagcaaggccttttttcacttggtcagcaacaagatcatttgttttgccggcttcacgctcttcaagcgtttcacctacacagatgatcggcacaatgccgtgtttgaaagctgcgtgtgcttttttgttaactgtttcatcagtttcagcgaacatttcacggcgctcagagtggccgatgacgcagtagtcaacgccaaggtctttcagagcaaccgggctgatttcgcctgtgaacgcgccgctttcttcgaagtgcatgttttgagcgccgacttttaggtcagtgcctttcacagcagaagcaagcttttctaagaaaagcgctggcgcgcaaacaacagcttcagctttgtctgctgctggaatggaagatttcacttcttcaacgaagctgacagcttcgccgagtgttttgttcattttccagttaccggcgataattggttttctcatctgttccacttccttatagcagttttgagattatttatcgttcagtgcagctacccctggaagctctttgccttccataaactcaagggatgcgccgccgcctgttgagatgtggctcattttgtcagcaaggccgaatttttcaaccgctgccgcagagtctcctccgccgatgacagagtatgtatctttcgcctctgccaatgcttccgcaaccgcttttgttccttgagcgaacaagtcgatttcgaatacgcccattggtccgttccacacgacaagtttgctgtttttgatgacgtcagcatacgtttcgcgtgttttcgtaccaatgtcgattgcttctaaatcactagggatttcagagatcggcacaattttcacgtttgcatcgttagagaaatcatctgcaacgagtacatcttcaggcatgtagaagttaacgcctttttctttagcgcggtccataaatgatttcgcaagctcgattttatcctcttcaagaagagatttaccgacttcatagccaagcgcttttacgaaagtataagcaagacctccgccgatgatcaggttgtctactttatcaagaagactctcgattacaccgattttgtcttttactttcgctccgccgatgatcgctgtgaacgggcggtcaggattggaaaccgcttttccaagtacatcaagctctttttccattaagaaacctgcaactgctggcagatgctcggcaattccagctgtagatgcgtgagcacggtgggcagcaccgaatgcgtcatttacatatacatctgcaagctcagcaaatgcttttgcaagctcagggtcatttttctcttcaccaggatagaaacgtacgttttccaatacaagaacgtctccgtccttcatctcagaaatttgtgcttttacagcatcgccgtatgcttcatccgcttttttcacttctttgccaagcagttcgccgagacgtgcagcgacaggagttaaacgaagctcctcaaccacttcgcctttcgggcggcctaagtggctcgcaagaaggactttggcgccttggtctgcaaggtgtttgattgttggaagcgcagcacggatacgtgtatcgtctgttacttccccgtctttcattggaacgttaaagtcaacgcggcagaatacaactttgccttttacgtcgatgtctttgagagtttttttattcatgcctaggagatcctccttcaaaatggtttgcatacagcacgaaaaacgtgaaaccgtctgttcaagcgataacgccgctagggcagatcgcagtctttttcggcacagggcagttcgtctaaaagccagggcagcggccttaggcgaaagcgccggcaaagctgcttaaaacgcggtcgtttctctatcacagagcgttttctgaaagccggtcttcatggaaaaagggaaagggagtccgtccccttcccttgtccgctttcattatagcgcttctattcgaaagaaccaagtcaggtcctttttcagctataaattaaagacctttttttgcgatgtaagctgcaaggtcaacaacgcggttagagtagccgctttcgttatcgtaccaagagattacttttaccatgctgccttccataaccattgtagaaagagcatcgattgtagaagagtttttgtttccgttgtagtcgccagaaactaatggctcttcgctgtagccaaggattcctttaaggtcgccttcagccgcttctttaagagctgcgtttacttcttcagctgttacttcttggttcagttcagcaaccaagtcaactagagaaacgtttggagttggaacacgcattgctccaccgttcagtttgccttttagttcaggaagaactagagaaactgctttagcagcaccagttgatgttgggatgatgttttcagctgctgcacgcgcacgacggtagtctttgtgcggaagatcaaggatttgctgatcgtttgtgtaagagtgaacagttgtcatcataccgcgtttgatgccgaatttatcgttaagtacttttgcaaacggcgcaaggcagtttgttgtgcaagatgcgttagagataacatcgtggttagccgcatcgtatttatcttcgttaacacccataacgattgtgatatcttcttcgttagcaggagcagagatgattacttttttcgcgccagcttctaagtgtttcgcagcgtctgcgcgttttgtgaagaaaccagtagattcaactacgatttcaacgccttgtttgccccagctaagtttagcaggatcgcgttctgcagaaacttcaattgttttgccgttaacaacaaggttgttaccgtcaactgaaacttcagcgtctaattttccgtgtacagaatcatattgtaaaaggtgagccagcatgttagcatctgttaaatcgttaaccgctactacctcaacttcaggattgtttaatgctgcgcggaatacgttacgtccaatacgaccaaaaccgttaataccgacttttactgccatgattgtttcctcctttaaataagtgagagatatttatattgagggattattcatcccttaataacttctttgcggctccttcgtctgtgacgagaaccgtgttgcgtggctttttaaagtaagcctcgatcgcctcggcttttgatgatccgcccgctaccgcaataatatcggggatggcgtctatgtcatccagctgcattccgacagaatgcactttgtgaaccacttcgccgtccgcgttaaaatagtagccgaacgcttccgtcaccgcgtcgttatcatctattttctttaagtcttctaaaggcgtgtttctgcgctgagccatagttttagcttcgccgattccatgaaccagcatactcgctgatttaatggtgttcagcacctctttgacagaaggctcttcaataatagatgaataggcgccttgtgacagctgtcccggaacaaacaaaagccggtaagtgcctgaagccttctccgccatatgcgcgcatatggtgttcgcctggtttttcacgtcttcgcctaaaccgcctcttgcaggcacaaacaaaagctcgcggtttttagaatccggcgtcatcatttcggcgacagcttcaattgtcgtaccgccagttacagcgacgatatttttgcctgaaaatctttttttcatacatgcgacagccgctcttcccatttcttttttgacccatggggattgatcgctgtctccggatacgataatggcatcctttagatttaaacgttcttttaatgtcttttccaaaagagtcaaacctaaaacatctttcatcgtatcttccaaaacagaaagcagttcatagccctcttctgtcaatgtcatgccgtttgtcttaatatcgaccaggttctgttcctttaaaaactgaacctcgcccctcagcacacgctcgctgatttcgagactggcagacaggcttcttcgcccgatgggttctgtcagcctgatatactgcaagatttcaaacctcttttgcataacgagcagaagatcaggcaataattttttttgagcttgtattaactggttcatgactcaaacgttccttccttttttgctggacgttatatgtcccgctatgacaaaaaacgtcccgtcatagccaaaaaaaatcatttctgctttctttaattattttaacagggtggaattgtttattcaactgttaagagccaattcatcgacaatattcgcagagttttcatgccgcgtcgttttatccagcaatattttatcctatatatctttatcttatacagaaagcgccaaatggtgcatcccaatataaacagcccttcccgtagaaagggctgtttcattaaagcgttttcattttatccaaagcttttcaatttcctcgagcgatttgttcttcgtttccggacagatcgtaacgacaaacaggaaacaaaggatgttaatcaccgcaaagatccaaaatgtataggcgagcccgaaagaatcgatcatcattggcacaaactgtccaatcgcccagtttgctccccataaaaagatggtcgcaatgcccgcggcccgcgcacgcagatggttcggaaagatttcagaaatcataatccatgtgatcggtccgaccgagacacagaaagcagcgacaaaacctaatataaggacgatcatcatgatcccgcttgttaactcaaagtaaaacgacgtcccgattaaaatcataaaaatagccataaaagcagaaccgatggacatcagtttttttcgtccgactttatcaatcagcaacaccgcaataacggtaaagatgacttctacaacaccgacgatacaagttgtcacaaatccggcgttttgcccgaatcccatcattttaaagatttccggcccgtagtaagtaatcgcgttcatgccgatgacttggttaaagagcgccagcaggattccaatgacaagcgcctttctgagccccggcttaaacagctgggagagcgaccccatttgttctatttttaaagagttctcaatgttctttaattcttcttttgcaacagtttctccattaatacgtgtcaggatctttaaagcttcatttgttttgcccgctttcgccagccatctcggactttccgggacgacgagcaggacaaggaaaaagatgacggacggcaccattccataagcaagcatccatctccagccggtgtgcacgccccattcgtatgttccggaccgctgcacagctagattaataaagtatgtagcggaaatacccagtatcgtaaagagctgatataaggaagataaacttccgcgtatggcgggcggtgccgcttctgtaatatacgtaacagagagcgatgagcccatcccgattcccagccccccgataatccttgcaatgattaaggtggacacgtcttgagaaagcgctgaaacgattgctgatatcgcaaataacaaagcggctgtcattaaaatttttctccggccgaatctgtcacttaaaaagccggatatcccgacgcccacaactcctccaatcataatgcttgaaatgacaagtccctccataaacggactcaggctgtataaatctttcagaaaaccgatggcgccagaaatcactgccgtgtcatagccatacaataagccgccaagccccgccgcacatgagatcaaaatgacaaatcccattgaatggcttcgtgttacaggaacatttggttctaattgagttggagtattcttcatttccctgccctcccgaatgttgagtaaagcgttttcatttaaaccttaaattgtacgtacttatattaaaatttaacgaaaattacatttaattagtacgtacaaatatagaataatcttgtttgcattttctgtcaatgttttcttacaaagaacgctgtgatatactgaaatttgtccgtatacattttggaggaatggatatgttaccaaaatacgcgcaagtaaaagaagaaatcagttcttggattaatcaaggcaaaatactgcccgatcaaaaaatccctaccgaaaacgaattaatgcagcaattcggcgtcagccggcataccatccgcaaagcgatcggagacctcgtatcactaggtctgctgtacagcgtgcaaggcggaggcacctttgtcgcttcacgctctgctaagtcagcgctgcattccaataaaacgatcggtgttttgacaacttacatatcagactatattttcccgagcatcatcagaggaatcgagtcctatttaagcgagcaggggtattctatgcttttgacaagcacaaacaacaacccggacaatgaaagaagaggcttagaaaacctgctgtcccagcatattgacggactcatcgtagaaccgacaaaaagcgcccttcaaaccccaaacatcggctattatctgaacttggagaaaaacggcattccttttgcgatgattaacgcgtcatatgccgagcttgccgcgccaagttttaccttggatgatgtgaaaggcgggatgatggcggcggagcatttgctttctctcggccacacgcatatgatgggtatttttaaagctgatgacacacaaggcgtgaaacggatgaacggatttatacaggcgcaccgggagcgtgagttgtttccttctccggatatgatcgtgacatttacaacggaagaaaaagaatcaaaacttctggagaaagtaaaagccacactggagaaaaacagcaagcacatgccgacagccattctttgttataacgatgaaattgcgctgaaggtgattgatatgctgagggagatggatcttaaagtgccggaggatatgtctattgtcgggtacgatgattcacatttcgcccaaatctcagaagtgaaactaacctctgtcaaacatccgaaatcagtgcttggaaaagcagccgccaaatatgtcattgactgcttagagcataaaaagccgaagcaagaggatgtcatatttgagcctgagttgatcattcgccagtccgcacgaaaactgaatgaataaaaaaagcaatgtatgggtctccccgctacattgcttttttttatagctgttatctgttgttccaaacgtcagcgatgatttcaaacgaacgcattctgtctgcgtgttcaaaggtttctgagttaaccataatttcgtcagcctgtgtcgttttgacgaaatcttcaagcttcgccttcacttcttccggacctccgacaatcgtggagctcagctgctcattgaccatcgctttttcatacgggctccagatttgatccatatcctcaacaggcggtttaagctggttcggcgtaccgcggacaagatcaagaaacctttgataatgcgaagtcgcaaggtgctgcgctttctcgtttgtatctgccgcgataatggtgacaccgaccatcgcatacggttcgtcgagcacgtctgacggcgtgaaggaattgcggtaaagctccaatgcaggaaccgtattcgctggtgaaaaatgagcggcaaaggcaaacggaagacctagttcacctgccagacgggcgctgaagccgcttgagcccagcagccaaatcggcacatctatgccctctccgggaatggcgcgaacttgattgcgcacatttcctgacggtttaaaataattgcgcagttcctctaattgttctggaaaatcctccccgctgttgatgtttctgcggagcgctctggctgtcaattggtctgttcccggcgcacgtccaagccccagatcaatccgcccgggatacagtgtttccagtgtgccgaattgttcagcaatgactaatgaagagtggttcgggagcataatgccgccggaaccgacgcggattttcttcgtgcctccggcaatatggccaatcaaaactgcagtggcggagcttgcaacaccttctatattatgatgttcagcaagccagtaacggtgatagccccattcctctgcccggcgcgccaagtccatgctgtttcggaatgattctgcaatcgttcctccctgaacaaccggagataaattcaagacagaaagcaaggtatctttgcgttggttgttagacatattgttctcctttgcaaatgtgttatcagtaaacagcccaaagctgtcaggtcatgattgaaagaacttctatcacaccataacacaactgcattcaggaataaaagaattttattcgatgaaattcgaacaatgtaaaacgaacggtttggcccgctattctgctccaaacagctccttagccatctcaataaagagcttagccgccagagaagcctcctttagcgacggaacagcaagctgcacatcacggtatacctgcgggtccaattcccgggtcaccacatgctccggaagcggcatccccgacatggacatttctgataaaatcgcgagacccaggccttctctgatcatactgatcgaggtgttgatgttatagaccgtgaaagctgggtgcagcgtagcgcccgcctgcctgaacatatcgacaaatggtgattcatagcctccgtcacagacgatcatcggttcatggtcaagatctttcagcgtaatggccgaatgactggcaagcgggtgatcgtccctgagcacgacagccattttgtcttttttcaaatgaatgtactccatctcctctgttggatacagaagaatcccaacatctatcatccgcgtatgaagccactccttgacttcatttacagttccctcgtgcagcacgagctcaagttttggatatttttgtttaaattcactgatcagcttcggcataaaataagccgaggcagttgagaatgtgccgatatggatcgttcccagttcaagccctttttccgctgctgctacctgctcaactttttcaatgccttttaagacttctctaatgtatactaagatctgttttcccgtatccgtcagcatcaggccattgcggcggtcacgaatgatcagctttacatcaagctcagcttcgatcgcagaaatcgcatggctgacagccggctgtgtcatgttcagcgcctgacccgcttttgtaaagcttcccgtttcagctattttcacaaaaacctttaattgtgtaatggtcataacaatttacttatgctccttataaaaaagattcattttatttatcttatgttctaccgtatcatatgatggaaaagttctacaaggagtgaatgaacaatgaagcagctctcaaaaacgcggacagctctcctgctcgcatttctcgtcatcatgtggggcgtcaattggccgctgtccaaagccgcgctcgcctattctccgccattattgttcgcgggcatccgaacgctgatcggcgggcttttattagtcattgtcgcactgccgcgtattcataaattacgcttaaaagaaacgtggccgatttatcttgtttctgctcttttaaatattacgttattctacggcctgcaaacgatcgggctgaattatcttccggccggcctgttttctgcaatcgtcttcttccagcctgttctgatgggtgtattttcttggctgtggctcggcgaatccatgtttgtaatgaaagtgattggcctcatcctcggttttgcgggagtagccgtcattagtgctgcgggctttggcgggcatatttctgtcattggggttctgctggctctcggctccgcaatcagctgggcgctcggaacggtatatatgaaaaaaacaggcagccgcgtcgattccatctggatggtcgctctgcagctgacgatcggaagcgtgtttctgctaatatccggcttttggacagaaagcttttcggcgatccaatggacagctccgttcattacgagcctgctgtttatctccgtattcgttatcgcactcggctggcttgtcttttttacgcttgtcggttcaggagaagcaagcaaggtcgcatcttatacttttttgattccgctcatatcaatcgtggccagctccattttcctgcatgaaccgctcacccttagcctcttggcagggctgctgctgattgtcacgagcatctgtctcgtgaatacaaaatcaaaagcgcagaaagctgcggcgattggtataaacgagaaagctgcacaataataaaaaccctcttgccggatgcggcaagagggtttcttatttactgatgcttgcgtcctttgaccaaatatgcaactgtaatcaaaaggtagatcgccgcagtaatgccggtaatgacaattgatgttgtcatgatgaccccgatcagaatggcgagtaatgccacaatcgcaaaccatgtcgtgtacgggaaccattttacataataggccggtgtttccgtttgctgttttctcgattttaaatgagcgaatccgatgatcagccaaatgaataaaacggtatatcccaatgatcccattaaataattaaatgtttggcttcctgcgaacagagaaatcaatacgccaatatagagagaagaagtgcacatcagaatcgcaaacatcggtacgtttttcgatgaaagcttcgagaagacctttggaagccttccgtcacttgcctgtgtatacaaaatgcgtgatgatccgtataaacctgaattcatagaagaaatgatcgccagcaggatgactgcattcatgatatgatccgcgcccggaatgcctaccattttaaagaccatcacgaaaggactttccggaaccgaattgacttggttccatggaatcaggctgacgatgatgaaaaacggcagcaggtaaaacgcgacaatccgtgtcagtgtgctgcggacagctttcgggacaaccttttccggattttttgtctctgcaagcgttacaccgataatttctgtaccgccgtaagagtagatgacgacaagcatcgccgtgatcagccctgtgccgccgtgcgggaaaaatccgccgtggtctgtcaggttggaaaatccggatgctgtatgatcaccgaatgatacaaataagagcagcaatcccagaataataaagataataataacggtaatcttgatcattgccagccaatattcggtttcggcgaagattttaacagaaagcaagtttacaatcgtgacgataagagaaattcctaatgccaacacccagatcgggcagcccggcagccaatattgaatgaaaattgcagctacaacagcttcagccgcaatgttgagcacccacattttccagtagatccagtccaaaagtaagcggcgtaatttcccaatacctgttggacaagatcacggaaggttctggcgttacggtttcgaacagccatttccgccagcccctgcataataaacagcaaaataatcccgccgagcagatatgcgagaatgacagatggccctgccacatcgatcgctgagctgctccccttaaataaacctgcgccgattgctccgcccagcgccatcatcataatatggcgggacgtcatcgtgcgttttaacgtttgattgtcgtttttcatcctcttctacctctccttctcgttttcaaaaacaaaaaagcccgccgtctcctacctaatctaatagataaagagacgacgagccttcggctgaccgcggtaccactcttgttgattcttcatgaagaatcctgcttttgacctgtaacgaaggttagccgttaaaacatagggaatattcaatctattccgttccgtcttaccactcccgggcgagttcaaagaagaatcaggctgcgtcgcaccaccccgcagctctctgttctgatcactttcttttactgctcccaatctatgtgttttagttttctgaaaaactcaaattttatgatctgaatatattaacataatatacgtgcttctcttttaactgtcaataacttcagagaaaaaagaaactgttattttgtcccttttcgaatggctttccaaaaggattctgactcgtttcctaatgcgtaaactgaaacacctgctattttatattgctttgccagatggcttttcgtttgaacggttttttcgttttcataccacacgacatgtttatgcttctttttgtcaacataagaaaacgtcatcgagcctgattttttgttgaatgccggctttgctttttgttttttgatgagggatttgagctcattccattcccttattgtgctggtacttccgtcttttacatcccagtcatagccgtacgcagggattcccatgatgactttattggctttgatctttttgactgaaaactgcagagagcttttgatccagtttgtgcttgccactgaccccggctcaccccaaatgccgtgttcatcgtaggtcatgacttgtacgaagtcggcatatttgccgattttcgcataatcatacggccagctccagtcatcatttttatcatcggcgcttttggccggaacggataccattgttttaatatgtttcttattcaaagcctgtgagacatattgaatgaagttcgagtatgcagcgcggtcttctggatttactgcttcaaaatcgatattgattccgtaatatgagtgctttttggccagtgtaattaattgatctgtgaatcgttttttcgctgttttattgctcatgacccgactcgctaaatctccgtcaaaatcataaatggcatcattatagtttgaaatgacagcccatgtcttgatttttttctttttcgcatatgtcagctgcttagttggggcatcgccaatgatttgtccgtttttttcaaacgcaaatgtatcggttgcgatggcattcatgtatgtatgatatttcgtaagagaattgtatgaagccgtatccccagtcgtgtagcctactgtcataccggctgccttcgcttctccttttgtatacataaacagaacaatcgcaatcgccagtgaaaccgctatgatcagccattttttcattgcatttcctcctgtatcaagtcatactcttctcatcggccaaaaaattggaagttgaagttttttcaagcaaaaagcccggcatatgcctgccgggcttcctgagttcagcggtcagagacgagaatatatgctgcctttactggtccatgcacccccacaactaaatccatttcaatgtcggctgagttactcggtccggtaatgtagttgatacatgaaggaacagtgacaccgttcgcaatgttttggcggatgatatcactggcttgtgtcattctcggtacaatgcttgatttcggcacgatcgcaatataagtcgttggcaaaaggctgacagagcggccgatgtcttttgaggagaagaggacaaccgtccccgactcagccaatgtaatttcgctgaatgtaatccctacattggcttgctccgcttttttaatattttcctcgcctttgtcagcatcccactcccagaccggcgttccttcactcggccagtccttggtgagcaggcttttcagtccgtattcttcaaagcgggggtccttcggaatgatgacagggcctccagaaaagcggctgacttgctcgcgcagggcatcgtaaaggccggttgaatccgtttcaatcagctctgtatggattttgacgcaatggtttttgagcactgtgactaagtcatccgctgaataaccttcaagtgttttatattgcggctcatacgcccattcagggactgccacgcctcctgttcttctttcacggcccaggctggatgcgattcgatttaaaaagctctcttgattctgaatggttcccttcgtcatcactgctcctccttcgtgcgttcacttgtttctctgtccgcaaaccagtctctgaatctcgatttatgcggtgccgggaagtcacggatctgggtccaatttttaagcgggccgggccctttcgaaattttttcgtcctctgtaaaaggcgtcatggcggccggcgcccattttgagcccattttgtaaagcgataaagaggatgcgccaagtccgaatgctttcattgcaagcttttcactgatcggcgctctgccttctttttcgacgatattctgacgatgcttgagtagcagctcatgaagcgggattttgaccgggcaggcttctgaacaagcagcgcacagtgaagacgcgtacggcagctccttataatcgtcataaccgccgagcaacggcgataaaaccgctccgatcggtcccgagtagattgagccgtatgaatgtccgccgacatggcggtacacaggacagacattgatacaggcggcacagcggatacattgcagcacagactggaattccgttccaaggatattggatcgtccattgtcaacgatgacaagatggaattcttccggaccgtccacttcaccttccagcttcggacccgtcaaagctgtaatataacttgtcagccgctgtccgacagcacttcttgtcagcatgctgacaagcacttcaaattcagaaaatgacgggacaatccgctccattcccatgacggtaatttgtgttgtcggcaaggtgctcacaagccgtccatttccttcattggtcacaaggctgacagaacccgtgtcagcgatggcgaagttacagccggtaatgccgatatccgcttccagaaactttttccggagaatggcgcgcgcatgcatcaccagctcttccggtttttctgtatgttgatagtccagcctttctttaaacacatcgcgtatctgctctttatttttatgaagggcgggcgctacgatatgtgacggcggatcgtgatcatcgatctgcaaaatatactcgccgagatcggtttctacgacttcacagccttccttctccagcacctcattcagattgatttcctctgtgaccattgatttagatttcacaattttcttcccgttcttcttttgaatgacatcacgaatataagaagacgcctcttccgctgtttccgcgaaatagacatgtccgcctcttttcgccacattttcggcaagctgtccgagatagaaatcaaggttttcaaggacatgctgcctgatttcctctgataatgagcgccactcctcccagtttcccagttcttctgctgcctctaggcgccgcgtccgcagacgctcctgtgcacctgaaacagcgcctctcataaattcattatcaatcccctgtgatacccgctctttaaaagcgtcagtaccgattttcatcgccatgatcctttccccctctgaatccagttttatctgctgttgagcacttcggcgatgtgcatcactttgacattcttatcttttcggccaagccgtcccccgatattcatcaaacagccgcagtcagcaccgatcagcacctctgctcccgtttcctccacacattcgactttttcatcgaccatctgctcagaaatctgcgccatcttgacggagaacgttcctccgaatccgcagcagttatgtttgcccggaagctctgtaaactgcaggcccttcacatggctcaacagcttcatcggctcctcccgaacacccagcagcctagtcatatggcacgacgtatgtaaggtcgcttttgtatgaagggtcgcgccgacatcctctactccaaggacgttcacaataaaatctgtcagttcatacgttttatccgccagctttttcgctttatcggcccatttcggatcatcctgaaacaggtgcggatactcccggaacatcgttgtacaggaaccggaaggactgacaacatattcggaatcctgaaacgtttcgatcatccgtttcattgcttttttggcgtcatgtacatagccgctgttgtatgccggctgcccgcagcaaatctgcccttccggaaaatcaacctcgcacccaagccgctccagcagctcaaccgttgcttttccgacatttgtttgaaacatatcaacaagacaagtgacaaaaagtgagactttcatgatgaacccctctctcatccccaatatatgatcaggtcatctgatgacctgagttaaaataactatatgaatatcgtacactattctgacaatggaaggaaagagttttctagggatattttcatttgtggcatatcaaaaacactcccgatctcccaggagtgcagtatatggttaaatccagcccttttcctcagcgatgctggcggcttctgtccgatttttcgcattaagcttttggatgatttctgagatatagtttcgaactgtgccttgagataaatagagctcaagcgtaatgtcttttgttgtcttgcctaaagccgcaagcctcagaatttcttgctctctaacggttagcggattttcgtctcgcatcatattaaacgtcagctcagggctgaagacacgttttccctttacacattttcgaatggcatcggccagatcgtcaatttcgccgtctttcagcagatacccatgtgcaccggcctttacggcgcgttcaaaatatccggggcgggcaaaggtggttaaaataatgaccttgctgacgcagccttttttcattaattcctctgccacatccagcccgcttcgaaccggcatttcaatgtccataatgcatacatccggctccagcttcaaaatagcatgtagcgcctcttccccgttcaatgcttgtccgatgactgtcatatcctcttctaaatcaagcaaggatcccaaagcgcctaaaagcatgcgctggtcctcagcaataaacagacgaatcattcttttcgtcctccaatcattctgcttttttaataagcggaatcgtcagtgccacaaccgttccgttatgatctgaaaccgttaatcccccttcaatgagcatgagccgttcttccattccccacaggccattcccaaacattttctccttcggcgctccctttccgtcatcccgtattacgatcctcattttgtcagcaaattgagaaatggtgatggcacagtgggttgctttgctgtgcttgataatgttagtcacggcttcccgcatacacatactgataatattttgagtgacgggagatatcactgaaaagtcgtcggctccttcgtattgaaaggtaatgttccccgctcttaatatgtgctgaatgtttacgagctcctctgttatcgtgaccgttctcatatcagaaaccagctctcgaacttgcttgagtgcggagcgtgaactggtttccatttcttttgcctcaagcttggtccgttctggatcagatgcagacagccgctgaatgagctggctttttaatgtaagcagcgacagggtgtggccaagagtatcgtgaagatcacgggcgattcgaacacgttcctcccttttagagagttcttttatctgttcgttggcttgtgcaagcttagcttcaagctcaatcctccgaaacatagaacgaattccgaatggagaaatgagcataatgacgagaaacgggagaacagaaaaaagctcccgaagcgagaccgaattcgcgataaattggtataggcatggaaaaagcagtataaagattaaagcgcagaacgcacggttaaaattcgttttctctttgtaataaccaacaaagtttgccggaaaaaaacctaagtatatataggtgatattgtaaaacacactatacatcaaaataaccgccatttgcacgataagccaatatgtaaacgaagctttgcccacgctgcagaataactggcgatatgccgctacaaaaaggagcagcataccatatccgatcccctgtttgacccctgattcttttaataaagagaggaacggcataatcgtatacaccagaaagatataagggaaaaacccgaattccttcgggaaaatagatattgcctttttcatgtattacaccgcttcttgttttcttcttatatatttagatagtagcatgaagagcatcatataagcgattaatatcagaatatttttccaagtcggactcccaccccggacaagttcccacgctccgctcccgaaatgataagacggaagccactggccaatgctctgcatcatgtcaggcatgacctcaaacggcatccacatccctccgcctaaagccagcagcatataaagcacattactgattccggccgctgtttctacttttctcatgaggccgattagtgtgcctaatgctaaaaaaggcaatgcgccaaacaaaatccacagtccgctcatcatccattcaaacggtgacaaggcaatatcattgatgattgcgccgaacagaaatatgacggtaattgataaaacgtgaatgacactttggccgatcatctgagctgataaatagatatgatccggaagaggcgtaaggcggataaaggcggtccagccttgtgaccgctcttgtaccattcggatgccaagcgtcatgatagaggaacccatcacgctgaagactgtcatcgacatcaggtaatgggcttcccatgcacgttgatcagggacgttggtattcactacatttgtaaagaaataataaaaggcaatcggcatgatcagagaccaaagcacaaagtacttgttcctaagcacccttttcatttcagcgatgctttgcttttgcagcacgttcactcacatcgcctccctgttgccgtcagccagctggcgaaatgcctcatcgagcgttgcttgctcaattcgaatatcccgtgcatgtatgttttcttgaaagatcagcgccaacactttgtctgtatttgatgtctggatgatggttctctcatgctcgtggatcactctctcgacttccgggtgacaagacagcctttccaatgattcacttgaatgaagcgtaaaggaaacagactgtttttgaattcttgagcggatttgcattggtgagccgtctgcaacaagctgtccttcagtaaaaaataggattcgctgtgcggcatcatctgcttcctgtaaataatgagttgaaaaaataatcgtttttccttggtccgacagtccgtgaatggtctgccagaatcggtgtcttgatgaagtgtccatgccgactgtcggttcatcaagtataagcagctccgggttcccggcaagagccaaagcaaagctcaaacggcgtttttgtccgccggataatttttctgctcttgttttcaaatcttctttggtgagtgctgttaacgaaacgagttctttcatggacaatggattcggataatagctccggaagagttcaaggatttcatccaccttaaggcccggcatgacacttacttcctgaagcattacacctattttttcacgaacctgttgatcatcgggaacccggttaaatagtttgatttctccctcactcggtttcagcaatcctaatatcatcgagacgacggtcgtcttccctgccccatttggcccgagaatggctgcaatttctcctttttcaatactgaagctgatgtggtttacagcggtttttcgctggaaatgttttgtcacgttgcttactgttactgcttctttcatcacatgagcacctcctgatcgtttacattgattgtaaaatgacggagaagacgatgttagtatggggtgtcatgatgatggagtgacaaatgtcatttttttctcaccccggtgtctaggcaatcctcctcctgcatcttccaattcatccatcttttctatctcccatgtcctctttcttttaaactgctgtgacattcatagaaagatacactcttcaaaccatccgagtgttatgatagaaatattgaactttatattactttccggctgaaaggagccaatcatgaacgaagcgattttgtctagaaatcatgtgaaggtgaaaggcagcggcaaagcatctatcatgttcgcacctggttttggatgcgatcaaagtgtgtggaatgccgtggcacctgcctttgaagaagatcatcgggtgattttgtttgattacgtcggttcgggacattcagatttgcgcgcatatgacctgaatcgttaccagacacttgacggctatgcccaggatgttcttgatgtttgtgaagctttagatctgaaggaaaccgtgtttgtgggtcactccgtcggggccttgattgggatgattgcatccatccgccgcccggagcttttttccaatctggtgatggtggggccttctccttgctatttgaatgatccgcctgagtattacggaggatttgaagaggagcagctccttggcttgctggagatgatggagaaaaattatatcggctgggcaactgtatttgcggcaaccgttctgaatcagccagatcggcctgaaattaaggaagagcttgaaagccgtttttgttctactgatcctgtcattgcccgccaattcgcgaaagcggcgtttttttctgatcaccgagaggatctttcgaaggtaacggttccctctcttattctccaatgtgcagatgatatcatcgcacctgcaacagtaggtaagtatatgcatcagcatctgccttatagcagtctgaaacaaatggaggctcgcggacattgccctcatatgagccatccagatgagacgatacagctgatcggcgattatttaaaagcacacgtgtgatataggaacgaaagggatagaggtgaccctcttagatggacaaacaattgaatgatgcaccatgcggtttcctcgctttgtcagaagaggggtcgatcatagctgccaaccgcacccttatcaagattctggattatgagccggagcaggttatcggccagcatatgaatatgatgttgacaattcccgcacagcttttctgccagctttatttttttccgcttttgaaattggagcatcacatcgaagaaatatacatttccctgaaagctagagatggagaagaaattcccgtccttatcaatgctattgcgagacacgatagcggggcttctgtctttgattgtgttctgattccaatgcgaaagcgaaatgaatatgaaaatgagctgctgatagccagaaatgaggctcaggaagctttgcttgccaaacagaaagccaatgcggagttagagattgccttggaaacgctgaaagcaaaacaagaagaacttcttgagatcaataaacaaaatcaacaatttaaattaaacaccaaaagagagcttgaactcgccagaaagatccagaaaaactcgttgactgaaccgattgtaaacgatcaggttcagattgactcttattacaacgcatcgagtgaattgtcaggtgatctttacggatattatcaaatcgatgaacaccgttacggcattattatccttgatgtgatggggcacggaatttcatctgcattgattacgatgtctcttcatcctttgttccagcgccagatcacgcaaggtctcagccccgttaaagttatgaaggaattggaccggcaccttcacagcttgtttcaaaatgatgaggaagcaagacattattgcactgctatttatctcgagattgacatagcacggcaaagaattgattatgtcaacgcaggacatccgccggcactttggcaggacgatagcggaactcaacatctgcttcacgcgacttcgcctccgatcggaatgtttgaagacttagtatttcagtcaagcagcctttcatacacggagggcggaagattgcttctgtatacggatggcgtgatggatcctacggcttcatgttatttatatgatttactaaaggatcatcctgattcgccgatcgctgaccagaaggagaaaatccttacatcactgcagcatcaaaaggaagctcatcataagagtgatgacgaatgttttatattagttgatgtaaaataaaatgatccatgagacataacaatgatttgttacatctcatggattttttgtttcagcgtttctttggaatatgtcctgactccgcatattgaaacacctgcaaggaaggcagcgggtgtccattaaaatcaaataaagcttgattatctacagcacttcccccataccacttcccggcgtcttcagggtcgtattcagcagcatagctggacgcccaccctgacccgtatgtttcccataacactttgtttttctctatctgtgttttcggtccgaccggaatccacgcaggctcccagtagaaaacaccaagtcctgctttgcccgtattcgccactgcctccattacatctcttactgcagttgcctggccttgaacagaaattggatatggcagcgtctgcccgctttttggtgctgtatttccatgcccatcgccatcctcggcggtataggtgtacgatgtctccgccaccatgacttttttgccgtacgtgttggcaacagccttcagcacggaggtcaaattttgtaatgtgccatgccagaaaggataataggagctcgcaaacacatcataatccactttgtttttgctgagtgtttccgcaataaatgaataccttccagccgtttcaggattggtaaaatgcagggcgaccaaaatatttgaatttgtctccctgaccgctcggcttccttcattaaataattggcacatcttcgtccaatcagtctcaccggcaaatcctcctgttgtttcatttccgacctgaaccatgccgatgtcaacgccttccttgatcatcttttgcaggctttgtttcgtatactcatagagctttgctttttttgcttcaaagctgagattcacccaggctttgggcaccttttgtttcgctggatcggcccagaaatcagagtagtgaaagtcggccagcaccttcattccgttcgctgtcgctctttttccgatttcgatggctttttgaacatcattgtttcccccgccatacccgttgccatttgaatcatacgggttattccagatgcggacgcgaacatagttgaccccagcctgttttaaggttgtaaagatgtcctgacgttttccgcttgtattataaaaggtgacaccgctgttttccaaagcaataacgctggacacatctgcccctttgataaaatccttgttcatcccctctacttttttaacaaaaagatcctctgtccgaagctctgacacgtgcttgtccttctcaatggcagcggcatatcctgttgaactacatgcactccacacgatggcagccgcaaagaacattttcactttgcttttcatgatttcatccccccaagacttagtaagcagtttcattctatagaaaaaagaatccgcccatatcgagcggagcatcagcctaatgtgtgtttacgacaattctcacttcatacttttccatcgtcaggtcgcctgacaatatgtctcctgtcattatgtccttcacactctgatcaaacgtgaccagttgtttttcttccgtaaagttcatcacaaaaatataatcattgtcctgatcctgcctcgcttgtacggagacgccttttccgtgccgaaccggaaaaactggagaaagagacaggtctgtgatcagaccctcatagaaatcacgctgaaattgatcctccaaacgcgcgccgataaaatacgccttgccctgctgatactcatggcttgtgaccgctggcgtgcgcgcataaaaatcttcttgatacactgcttccactgaagctgtctttacatcaatcacggttgcataatccttcatttcatatatttggctgcgatagctgacagcgtttcgatccttcggatacagggtgtccgtttcaagaggctcaactccaaatatagcttgaaggtccggatgccatccgcctgtgtatgttaagtcatgctcattcacaaccccgctgatatacgtcatgactaaggtgccgccgtcagccgtaaacgcttttaaacgggaaatggtgtcctcgctgattaaatacagcatcgggacgatcagcagtttatatggtgaaaagtcttgttctttcgtgatgacgtcgacagggatatcgtgttcccagaatgtgcggtaatgctgctgaagcgtttgcggataacgttttgtcgccttcgcaaacccctgagcatcctcgagcgcccaatgattttcccagtcatataaaatcgcggtttgagccggcctcttcgttccgacaacttcggacagccgttccaatgtctcgcctaccttggccacttcttgaaagacgcggttctttgggctattgtcatgatccacaaccgctccgtgtaatttttctgatgacccccgtgatttgcggtattggaaatagagtacgctgtccgagccgtgggcaatcatttgcatggatgacagcagattcatgcccgggcgcttcgccttgttgacgttatgccaattgaccgcgcttggcgtacactccattaataagaaagactgctgcttcaagcttcggtacaggtcgttgataaaaccgaccttcatcgctaaatcagctgtgctttcccagtcattgtgccagacaggataagcgtcccagctgatgacatcgacatgctttgcaaatttgctgtagtcgaggccctgatacgggatcaaatccggtgtgtcagccataaaattcgttgtgatagggatatcaggcgtcagttctttcagcggaatgatttcatttttataaaacgaaatcgtttgatcggtgacgaaccggcgccaatctaaattcaggccatgcaagccattttcaccgatcggcgaagggctttcaatttgtgaccagtcattgaacgtatggctccaaaaaggagtccaccacgcatggttcaatgccttgaggctgttgtcatatttcgatttcagccactcccggaaagcatgctggcataaatcacagtggcaatctcccccgtattcgtttgaaatgtgccacattaacagcgccgggtgatgtccgtatcgttctgctaataagcggttgatgtgccgtgttttttctcggtagactttagatgtgaggcagtggttgtgccttccgccgtgcagctgtttgacgcgggaggcattgacgcgcaaaacttccggataggtttgcgacagccaggccggacgggctccgctcggcgttgctaatatgacccggccgcctatactgtgaatccgctcaaaaatatcatccagccattcaaattgatatacaccctcctccggctcaagtgcgctccatgcaaaaatgccgacagaaaacgtattcgtatgagaaagcttcatcagtttgatatcgtcagctaaaatatcgggccgatccagccactgatcggggttgtagtctcccccatggagcataaatttcgcttcggttacgtgcgttttttcaagctttgacatcacattctcctcctttttctcttagcccttcgttccgcctgcggttaatccggacacaaaattcttttgcagcatgataaagatgagggcaaccggtatgctgataagcagggctccggccgcaaatgtcgtatagctggcccccatgacatcattcactaaattgaatagaccgacgggcaatgtatatgattcaggcgttctcaatatggttgaggacagcacaaaatctccgagcggaccggtaaagccgttcatggccacgactgccgccatcggttttgataatggcagaatgatctggaagaagattctggtgctgctggctccgtcaatcttggcgctttcgtctaaatccatcggaatggaatccatgtaccctttcatcaaatacgtattcatcgggatcaggccgccgatataaagcaagattagcagccagtggctattgatcattcccaagatttgcgccagcacaaacaaggcaattaaagccgaaaactgaggaatcatctgcagcaataaaaagagcgttaaagcgtatttcctgcctttgaagcgaaagcgcgaaaacgcataggctgtaaacgtcacacagagcaaagaccctgccattgtaaacaggctgatcttcattgagttgacataccactgcacatattgaaggctttctttgcccgcaaataattccttgtaatggtcgaatgtcggatgcttcggaatgatggatgtactgattaagctgttgccagggttaaagcttgcgcctgccgtccaaaggagaggataaacaatgatgaccgccataaaggctagcaacaagtaagagaaaaggagacggatatattttctgactttcatatctgccagcataccttatgccccctctttaaaagactttgtctgtctgaattgccacaatgcgatggagataacaaatacagataataaaatggttaaagccgcagcaagagaatattggctggactgcattgtcaatttataaatccatgaaacgaggatatctgtcccgccggctgttgatccggttacagccggacctccgccattgaatagatagataatattaaagttattaaaattaaacgtaaactgggtaatgataatcggagccattgcaatgaacaccatcggaagcgtgatgtatctcagctttgaaaagacagaagcgccatcaatcgtagctgcttcatacagatcgtccgggatggattgcaatacgcctgttgagacgagaaagatgtacggaaatccgagccagccctgcatgagaatcaacgcaagcctcgaccaattggcatctgtcatccacggaagcggatctatcccgaagaaagccaagatgtcgtgattcatcgcaccgaagctatcattaaacagtcccgcaaaaattaaaatcgtcacaaaaccgggaacggcccatggcaaaatcagaatcgtccgaaaaaaacgtttaaaccgaaggtctttctggttaacaatgatcgcgagaaaaatccccaagctgacttgcagtgtggatgcagcaagtgtccaaaccaccgtccaagccagtacatcaaaaaaagtcgacctccaaatatcaactgtgaaaatatttgcgaacgtttgaaaaccgacccaatcaattaattttgcaggaggagaatgatacaaatcatagtttgtaaacgctaatgcaaagctgaataagataggaaagatcacggcgaaaattaaaataaacaaagaggggccgctgacgacataaggatagccctcagaaatgatatgttggtattgttcctttaaggaacttaatggcttattttcatcacgctgttttccgctttggaacgcatcgcgaagattcacataatacaccgcaaggccaaagcaggtcacgatgacagcgataattccttccgccagcagaaaaacggaattatcccgcggcacttctgttcccagtgtaaagattccccaaaaccccatattgagcagatctccaaagaccgcaaaaaacgatgcgcctaagaaaagaaagacaataccttttatccattgcttgttataaaattgcccgagtcccggaatgatagaaagcaacaaagcgacttgacgatgctgcaccgttttcacctctcttacaatacaaatctagctttctctttattttccgctgtgctttgccttaatttgtcctttggccgtttcagctgcttgatccaatgcttgtttcggatctgccttccctgttgcaaccgtctgtaatgctgaatcagccggcgtccatatttcattcatttccggaatatttggtgttggctctgagaaacgggattgttcagtaacagcccgtgccgcctcgcttttcataatagccgggtcattggctagggatttcacagcaggaacttctttcgtttcttcatatcgtgttttagaatttttttcatttgccaggaaaacggctaattcttgcgccagttcttcattctttgtaaatgcactaacgttgtagcttttgacgccgataaaggagctcatgtttttcctattttccagcttcggcagtttcgtaatgccataattgattcctgctttcgaaaaagcttctacattccatggaccagaaataattgcggcggcttttccttctgtgaacagcgattccaatacgttaatcccttgttctccaataatgccagccgggaacaggccatctttgtaaaacttctgaatcagcgccgcacctttgacagctccttcattattgattccaatgtctgacgggttatagctcccatctttgtcctttccaaaaatgtatccgccatatccgctcatcacactttctgcataataaatttgatcgaatagggctaaaaagccaaaattgctgccatcagctgtctttttggaatagtcgtaccactcttccagcgttttgggcaattccttttctgtgatgagatctttgttgtaaaaaagcacagtcgtttcgaccgcttttggcagtccataaagcttttgatctaccatttgagactgaatggaagcgtcagtataaagtgattgaacgtcttttttgacatgtaattccttgagtaatccttccgtgacagcggttccgatttggtcccctggcattgttaacacgtcagggcctgtgccggccggtccgtccattcgcaaatcttcaatctgcttggcatacggtttttcaacgactttgaccttcacatcatgctctttttcaaacgcagcaacggcgtctttaatgccgatgctcttttctttatcctcccatacaacaagctctgacccttttgaactcgatttggcgctgctgctttcctttgggccgcaagccgccaaggataaactgacagctgcgcagagcatgaatacggaacacttttttgccattttcattgattgtcaccctttcggtaggaatgaaagcgctttaaagataatatagcacgcttgagaaaatgtgtaaacaaactatttacctcatagagtaaatttttttacttaaataaaaatgacttagtgtcctaagtcattcttaattcatactcttcctgacgattaattctgcgcccacatataatgtttttaccgttcttctcttgtcctgcacttgttcaagcagtaattgaacagcgtttttacataattcatgtatatcaatatgaaacgtcgtcagaggaggcgagacatacttcgcgaagctgatgttgttgatactcacaatgcttaccctgtttggtatagcaattcctttttcgttcagggcttgcagacagcccactgctatcgggtccgctgcaatcataaaagcagtcggaagctgatcgcctaatgtgtcgatcgctgctgacatcaggcggtagccgttttctacagagaatccgcgatgacagaaaatatagcgctcgtccagcatggctttttccctcatataggatctgaaggtttgttcacggatgtccatttcatcctgattggtattcggatttttgtatgtgccgccgataaaaccgatgctcttatgccccttctcagccaggatgtttaccgtcttccttgtcatttgtgccaaatcgggccttaccgagtcaaaatgatcgggatcaggagttgaatcgatgaacacgccgttttcagtgagatttctgaggaaagccagctcttcatctgaaaatgtgccgacggcaataaacccttccgtatgttcaggaatgctctcgattccatccgctattttataagtggtcatatcgacattgaatgctttcgccagtttctctacttctaatctcatcgttttaaaatagacatcttctaattcttctttatctgtcagccaatataaaaacgcaatatgtttcaccagcggccttactgtttttttgcggtaattgagcttttccgccgcttcatagattttctcccgtgtttcatcaggaacagaaaggctttcatcgttatttaaaacgcgggaaacggttgagattgaaaatcccgcttcctgcgcgatatctttaattgtcgccattgcatctgcctccattattcagctcgcattgttttagtaaaatattttactttctttttcgcaaatgtcaagtgcacaaagccctctggctgcctcatgtaaaaagactgaaccatttgcggctcagtctcagttgttcgtatcattcggaaccggcggaattgcccgggaaatgagttggttattgcacattttcctcgaaatatcccgaaagcacatcttccacattcgtcaaatgcgccagcatggcggcttccgcctctgcaccgttcccggcagccacagcattgtaaatccgttcgtgctcctcatacagccgctgaacggaggtcttcttggaaaacagccagattttcctcgtttccctcattgtttccagcagcaatgatgacacgtgattcatcaagtgtttaagaagttcattttgagaagcgtccgcaagcgcaagatgaaatgcaaagtctgctttctctcccagctccccgtccgcttcaatgctgcccatttccttcagggcatcatgaattctttcgagatctgcttctgtccttttttcagccgctagtgaagccacgccgatttcaagcagttttctgacctcgagcagctgcttgacgtcctcttttttcatcagaagggcggctgagagcggctgagaaatttgattgagctcaaattccttcagatacgtgccttctccctgtttcatttcgacaagccccatcgcttttagcgcagaaagtgcctcgcgaaccgctgaacggctgacttgaaagctctcagcaagcgcctgaacagagtccagtttatcccccggcttcaattcgccgtttttgatcatatctaatagtgcatccgctacttcttcatatattttttttgttttaatctgtttgtatttcaatgcaattcaccccgtaacttgtaggtctggctgtttacgatctattatactctgttttgtgggccgccaaaagattttgactattttgtcaaaaagtcttgtactttgatttttttcaaaatataatgctaggtaactggtcttattacccagtcatcagatgatcatatcatctatagaaaccgcttacatatggcgccagtttatgtttcaaggaggggtttgggatgcaatggacacaggcatatacgcctatagggggaaatttgctattatcagcgcttgccgcacttgtaccgattattttctttttttgggcactcgcgattaaacggatgaaggggtatacagcaggcttggccacattggggatcgcccttatcattgctgtattggtttatcggatgccggcggaaaaagcgctgatgtccgcgacacaaggagccgtatacggattgttgccgatcggctggatcattgtgacgtctgtttttttgtataaaatcactgtgaaaacgggacagtttgatatcattcgcagctctgttctctcaattactgatgaccgacggcttcaagctctcttgatcgctttttcattcggggcttttttagaaggggcagcaggcttcggagcgccggtcgccatttctgccgcgctgctggtcggtctcggctttaatcctctttatgctgcggggatctgtttgatcgccaatacggcgccggttgcctttggggcaattgggattccaattacagccgtagaagggccgacagggattccggcgatggagatttcgcaaatggtcgggcggcagctgccgtttttatccgtatttattcctctttatttaatcatcatcatgagcgggttcaggaaagccttggagatctggccggcgattctcgtatctggtgtttcctttgccgttgttcaatatctcagttccaattttttagggcctgagctgcccgatgttttgtcagctcttgtttcaatggctgcgcttgctgtgtttttgagatggtggacgccgaaaacaacattccggtttgccggtgaacaagagtcggccgcctcaattgaaacggcgcgcacaaatccggcggcgcctgcgtacagcggcggacagatttttaaggcttggtcgccatttctgctgctgacggcgatgatttccgtatggggcattccatctgtcaaatccgcgctgaccgggcattatgaaggctctgcggtgttcttaaagtggctgaatgctgttggagaaaaactgactttttccccaggtgtgccttttttgaacaatcagattgtcaatgctgacggtacaccgattgaagcggtttacaagttggaggtgcttggttcggccggcaccgcgattttgattgccgcagtgctgtcaaagttcatcacggcgatttcatggaaagactggggaaccgtttttaaagaaacagtccaagaattgaagcttccgattttgaccattgcttctgtcgttggttttgcctatgtcaccaactcctcgggaatgagcacgacactcgggatgacactcgcgctgacaggttcgatgtttaccttctttgcgcccgttctcggctggctcggcgtcttcattaccggctcggatacttccgccaacctgctgttcggcaacctgcagaaagtcaccgcattatcagtcggcatggaccccgttctgtctgtggccgccaactcttcaggcggtgtcacaggaaaaatgatttcaccgcagtcgatagcggtggcgtgcgccgcggtaggactcgccggaaaggagtcagatcttttccgctttaccattaaacacagtctgtttttgctgctgctcgtttgtatcatcacctttttgcagcatcacgtattcagctggatgattccttaaaaaaatcctcccgtctagggaggattttatttatatcgctttctcgctgccgatgacggaatattcatttgatcgcgatattttgccacggtgcgtctcgagatttggatgccgtgttgttcatacagcaaatcgacaagcttttgatctgaaagcggttttgttttgtcctcttgattgatcaggtcttcaagatgcattttgactgcataattcgacgcatctccctctcctgaagcctcggcttttgctgagaaaaagagcttcatctcaaacagcccgtaaggcgtttgtattgttttccctttaatggcccggctcacagttgattcatgaaggcttagacagtccgccacctctctcagagtcagcggcttcattgcgcttcgccctttcagaaagaaatccttttggcgtgtgatcagttcattgataattctcgtgattgtctgttttcgctgcctcagcgcgcggctcagccagcgccactcctgatatttcgcagataaataggagacagtatcctgacaggagccggatgataaaagcgttctgtactgcggatgcagatcgatctcgggaaacgagcgggtattcagttccgctgcgatgtgcccgttttttacagtgataaaaatgtcaggctcaatatacacatcttgctctggccgggcaaacagaaggccaggtctaggatgaagagccgcgatatcatctgagatatcttgaatagtatgaagcggaattcctgcctccactgaaagcgctttccattttttttgcgcaaaagcatcaaaatgagctgaaaccagcatttccgcttgttcatttctgttcggcagccgctgtaattgaagaaggatgcattcctgcaaagatctcgcgccaattccagccggttctaatgactggagttttgccaaaacagcctccgcttccttggccgatacagataatcgccgtgctgcctcctctatatcttcttccaagtacccgtttgaatcaagcgaatgaatcagataattaaaaatctttttttcagtgtttgtcagattcatatcgagtgactgctgttttaacgcatcctgcaatgttttttgcggattacttaattgaaggcccgcttcctgtgcattcatcctgtttttgtttgttttatggtaagatagtggcggtgtgtctgtttcctttcgttcaataagagggttttccagtgagagctcatcaatgtactcggcgagttctgccgaatgatagccaagcagcgtgatggcctgcctgagctcctgtgtcagttgaggctttaatacttgtacttgctgaagtttcatatccatcttgctcactcccctttcttcattgtacatgattgagatcacaccgtatacatttatgaaaaaggagctgccaaagaaatgtctgaacttttttccgtcccttattttattgagaatttaaaacagcatattgaaatgaatcagtctgaggataaaatccacgcgatgaacagctactaccgttccgtcgtctcaacactagtgcaggaccagctgacgaaaaacgcagttgtcctgaaacggattcagcatttagatgaagcatacaacaaagtcaaacgtggagaatcaaaataaaccttccgctcacatgtgagcaggaaggttttccttctttgaggcgtgctggatgagacgggtgcttggcacgccttccatccaggtatgaaagtaattggcgtttttcccgtaggaattatcaatgaccgtgttttctttttgaagaagagaagacaggatgtggccgtgcaacctcgatgtttccaccgattcgtaacggctgaaaaaccgaatcgctttttggacgatataatccgagtatttttcccatatatacgcaatgggcaaagggttgcctgcttttttattcaagacgttcagcgtttggagaaaagcaatcgtccggcggtctgaagctgacagcaccgtgcgccagtcgtagctttccgcttctgcgtgtccctgaagcgcctggtttgcttcatgatctgttcggataaatctcagtttttgattggacggctgctgcgtgggaatgacgggaaacagctgatgaaccatatcaggcagaagctgaatgtgatttcttgaaaaataagcctgtgccgtagcataggaggctttttcccttgtcataatgtgaaggttcgcatgcttagaaaatatctctgccgtccgtttgaggttgtctttgttttgaaaataaatcgattgcggcaggatcacaattttgtggttcggataggtttggacgattttctctctaaagccttgataatacggatacagatccccgaagtttccgcctccctggcagacgatgatgagatgaggatccagctttcgcccgactggaaaattgtcaggattccagcgttttctgacccgaatcccgtgttctttaaagaaggcttctgttcctttcataataaataaatcccctacattcccatatagaggatagtcagcatatataatctctgattgtttcggtatgacgtcgagcagcccggacagtttctgtttcaggctgatcatcgaatgcttgctgtccatttcttcacctcggcagtttggaataagtgcagtagcacttcaatgacccggtcttgctcatcttctgtcatattggaccccgatgggagacagattcctcgcttgaacaaatcttcgcatacgcttcctgtatcttcatgagaataaaataaagccggatcgaatagcggctgggtatggagcggcttccacagcggacgagcttcaatgttttcttcagcaagacgttgaactacgtcatatgggctgagcccgttatcaagtgtgagcgtggtgagccagcgattggatacgcctgctgcgtactccggcataaagcggacgccgtctatgtgaccgagcgcattgttgtatctcgtgaaaatggtccttcttttctccactcgctcatccagcacctcaagctgggcaatgccgacgccggctaagatattgctcagcctgtaattatgaccaatttgactgtgttgataatgaacagccggctctcgtgcctgcgaagcgagaaatcttgctttttcaattgctgcttcatcatttgaaacgagcatccctccccctgatgtggtaatgattttattcccgttaaatgaaaaaatgccgaagcgcccgaaagttccgctttgcttccctttatagactgtgccgagagattcggctgcgtcctcaatgacaggaactccgtatgcatcacacaggcttacgatttcatccattttcgcgctctgcccatacagattgacggcaatcaccgcttttggcagtgttccatttcttttcacttcctccaatgctctttcaagggctgtcggcgacatattccacgtatcaggctcagaatcaataaagacgggcaccgctttttcatatagaatcggattggcggttgctacaaatgtgaaggactggcaaaacacgctgtcaccttcttttacctcaagtaaacgcagcgcgagatgaatcgccgccgttcctgagctgaccgcagctgctgcttttacaccgactcgttctgccagctgttcttcaaatgaattcacgagcggcccaagcggcgcgatccagtttgagcgaaaggcttctgaaatatagtgctgctccctgccgctcatatgagggggagataagtagatttttttatgcatagaatcatcctttgtttgatgtttgaatggaagaaatgatgcgtgccggagcaccggccgccgttaccctgtccggtatgggacggatcaccgcggagccggcgccgacaatgctccaagccccgattgtgatctgcggtatgacggatgcaccggttccgacgtgagccccttcctgaacggaaaccgctcctgacagcgtggcacgcggagacagatggacataatcgctgatctgattgtcgtgctctgccactgcacccgtattgatgatgcaatgagcgccgatgcgcacatccgcctgaatgatcgcgcccgccataatcactgtcccttccccgatgacagccgacttgctgacgatggctgacgggtgaatcaatgtaataaaatcatctttcctcagacccagtcgctccgccagctgttttctgacactgttattcccaacagcaatcagaaacagcacatcaggaatgagcctgcgcagttcagtaacggcttccggcggtcctgtgtaccattcttttccgccttcgaatgttttgaatttatcatccagcaccgcggctaagcgcgtatctgagcgggcgtttatcagctccctgatcacctttccatgaccgccgtcacccacaatggccacgtttttcatgaggacacatctccgcttccggtaaaccgttccgcggtcacatgattggtttgctgaatcccttctgaaacaaggacctttcgcaccgtcaaacataaaattttcaaatcgagaaaaaatgaccggttgtcaacgtaccaaacatctaattcaaatttcttttcccaggaaatcgcgtttctgccattgatttgcgcccagcctgtgatacccggcttcacctcatggcgccgtgcctgtttttctgtataaagaggcagatagtccatcaaaagcggccgcggcccgacaaggctcagatcgcccttcaggacattcaggagctgcggaagctcatcaatgcttagctttctgatcagcctgcccgttttcgtcagccggacttcatcgggcagcagatttccctcactgtcccgttcatccgtcattgtccggaacttgtatagggtgaacggtttgccgtgcaggcctggccttacttgcttaaagaagacaggtgatcctattttcagcctgacaacggcgatggtgaacagaatgatcacactcgtacagcacaacaaaaaaatggcggccgtcagatcaaaaagtcgtttcaggatcaaagattcacagctcctttcgtttttcgaaaccgttttagtaccagctgtctttcctcttttgtacaaacgagcataaaagcgaaaacagcgtagcaaaagctgactgtcactcccgtcgctatcagtgacggccatccgtcaaccttcacaacgaactgaattgccttacagaccgtccaggcaaacacagcggctgatagaggcccgattatgcctttaaagaaaacgtgctttttgtagcctgtaatgcgggatacataaagcggcgtaaagatggcattttttaaaataagagaaatggcccctgccaacgttatgccgtacagaccgagatgagccggcccgctcagcgtgaccgccagcaccacattcaccgcacctaacagcagggtaacaatcgccggtgttttttgttgattaaaagcggtccatatataaaacagcggcataaaggcgaggctgacaaccaagtatccggcatgaataaataaaagcggtgctatcgttgaaaaggacggtccgagccagattgtcaaaaaaggtcccgccaatccgcccaataaggcagcaggaagtgcaagcaaaagaccattgagccttactgccttattggcgtaattcatcaacccttccatatcgccttttgaataatatgaagtcatgataggcgcaaacagggatgcgaccgttccggccaagctgcgcaaaagcagcggaaactggataatcgccgcgtatttcccggatgcggacgcccccagcatcaaattggcggttaacagatcaatctgcaaaaaaagcaggacgccgatttgattgacggagctccatgcgcccgcttgaaacagctccttgcttgtgcggaatgaaagatccttcatacgaaacgaaaaccacggaatcagctttttgaagaaatagaaagacagcacagacgcaatgacagcaccagctaaagctgcaagctggatctgccagattttcggcgcaaagcatgcaaacaggagcagcacagacagcacccgtataagcatttgcaccgcctgaatggaactggtgatataaaggcggttggcataaaatggtgcagcaccgaaacccgccatcagaaacgttaaaataaacagcacactgccgattaaaatcgacaaacgcacatctgccaaaagcgcttgcggcacattcatgacgcggtcaataaaaaaagccgaacccgcaagcggcagcaagagcagcaatgaaatcaaaacagaggccgctaaataattgctgatatacgcatttgctttctcccgctctcccctgtgggcagcaacagaaaagaaccgaacgacaaccgagctgagcgccacggtaataaccgaaaagtaattaatcacattttgtgtcaagtgaacaaagccaaacgcttcgacaccgagcgttttgacaataaaaggcgtcatccaaaccgataggaaaacagacaagagaaaagccgtgagattcgcgctgaaatttatcgtgaatttcatgcctgcttcgcactgcctttcattgtcccccgctgctcgaaaaacagcttgatgagaaaagtgagccgccatttacacagtgctaataccaaacgctctcctcttaataatttctcatgctgaaacggtgtatgtctgacagcctgccgcaccatgtcataggataaaatctgtctgatcttctttttgatgtctttcggcgaattcggagaagcacaggcatttgccaaaagcatcggaagctggtgcctgcaaatgtacacattcaaatcttcttggcatgcgcctgctaagccatagtgattgtagaatgcgattttagcttgatattgtttttgaagatgttcatccatcgccggcttataagggatttctgtcaggctgttcgggttttcacgataaatgtacaatccttcatcaagcattttcacccgctccgcttcgcaaaaagcggacaaattgaagggagagtcttcagcaaaacggatgtcttcagcaaacagcagattcgccctatcaaaaagctcacggcggtaaagataacgccatacataccagataaatctcgtttcgtgagcatgtttaagctgttcagtcatttctcgttttgtcagcacgcggtttgcctcaagctgcggcggcacatatgtccgcctgtccgatgactgtttgtaaaaaccgcatccgacgatgtcgagccgattttcctccgcttcttcagccagcctctggaacatggcggaaaatacataatcgtctccgtctacaaagccgatgtaagtgccccgcgcggcctttattcccgtatttcgcgctgaactaagcccgccgtttgcctgatgaatgacccggattctcgcatcccgttttgcataatcctctgcaattttgcctgaacgatccggtgttccgtcattcacgaggatgatttcaatatcagaaagcgtttgacgaagcaaagaatcaatgcactcccctataaatggttcaacattatacatcgggacaataatgctgacgagcggggtcattgcgcttcaccgctgattttgtcacgcagacctttaaaatacacatctctcggaaagcctgcacgggatgtttcttttgttaaaagctcattgactgcggctgttacgcgctctggctccggatgttctatcagcttcatgaacgggatgtctttaagccattgatagccctccatcaccttatggtcaaaggagcgaatgacaacacacggcgttcctgtcagcgcgcaaaaaatcatgccatgaagcctgtcagtgacgacggcttctgcgctttgcagcttagaccacagtgcttcaagttcttgttcgcgtgtatcgcggctgacccggcggccgatcgttgtcgtaaaggatttgatctcgccgaattcctcacatagcgcagccttgacccggttcctctggtcctcctgaagcacgctttcctgatcctcgcgcaaacacatataaaccccttcgcgttctgcgggggtcttgcttctatctaaatacagcaccatgtccggctgcttcaaaattgttttttcttgaaaatgctgtttcataaattgatacgttgtttcatcccgcgccatcagcaacaggccggggtgcgcattataaattttctgtgcccgtttcagctctttgcgcccttttttcgtgtcagaaaaatgagccgttgccggaagctggacaacccgatagtcatggaatgttttaatgatgaagcggcgcgtccactcctcataacggtataaatcccccatatttccgccgccgatgataaagaccatatcctccggatggcgcgagcggatcaggttttttgctgatttgtaaatgtccttcatatcgacctcgacgatgtcaaagtccgggtattcttgctcaagaaatgccttgctggcataagcaattgcgtgatctcccaaattgtcatgggacggcagcagggtcagtatgatttttttctgatgtgctgcggcctttaccggttgatctgccgctcccagccaatattgggacgggtatttgacctttagcagcagccattctgcaaaattgattttcaacgattgtaacgacatgtcctcaccctctgtttctcattttgtactcgatcacccgctgatacatagccgatgccatagcgacgaacggaatcattctgtatttcgccatcagaagcaggcatgaccgttttgcgtcaaaaggagcggtacccgtttttgaaagactttcttgaaacaccgggtccgcgcatatcacgccaacatttctaagcttttcaaacagtcggcggctgccgctcgttttccattcattcagcatgcagatgctgctgtgaagaacgataaaggtatcaagctccttgcgatactcctccagtttgttgttctcctgtaaaaacgccgcattcgcctcatacagcgcaagtcctgattcaaacaattttttctgatagcgctgcacaatggaggaaaggtgaattcggtaatgatagagcggcgtttttacgtaggatactgagcgggcgaaaaaatgagccctgaagctgaaaaactgatcctcgacatgctccagctcgcctcggagcggaaacgacagccgatgggcttcaatcatgcttcttctgtacagtttgttccatgaaaaccctctgaccttcccttcgaataatgccttgatatagtgctccttcggctgatcctgataggtttgggcaatgtctgagtccatggttttgccagtgtcctcaaactctgcggcgtaattgcaaatgaccagatcagtttcatcgcctgctgcccggagcatctgctcgcaataatcaggttcgatccaatcgtctgaatcgataaacgcgataaattcgccgcgtgccgcttcaatgcctttattccgaaccgcaccgagtccctggttttcctgatgaatcaccttgaacctgttgtccattttggcgtattcttctgcgatatccgggctggcgtcagctgaaccgtcattgacaatgatgatttcaatattgtccactgtctggttccgcagtgattcgagacacgttctgatatatgtttctgtgttataaacagcgactaacagactaaccgcaggtgtttccataatgaccggctcctcgtgcataaattaccgggaaaaaatcgttctgtaaggcagaaccgatgaatcaaccggcataagcaaataactgtaaagaaaataacaaacaacgatagcgatatagataagggcgttcgatttttcatcaaatatcctgacaaaataagggactaagatcatttgatacagaccgaaataaatattgaatctggcaaaaatcacgtcctttgtggccaaaaggccgaacaaaaaaccaagcaggcacaaattgacgacaatatcgatttgcggccacagactccgcaatcgttctttatagcaaaatgcaaggaacagcggcagaaccaaaacagcgattttgatcacattcattccatttgtgttcgtcatgagccatttttcataatggctgtatgagctgttttcaagtacaacgacaaacacagaaataaatttttgatataaaaatgtcatgccgagaaataaagcggataggccgaatatcgccggagaccaggcttttcttctgacaataaagtacaccggaatcataatcagcgccgacgaatgaaagagcgagctgacgagcacaatcaggaaatatcgcttccagttcccgctgatgatataacggatcgcccaaaacaaagcagctgccaccatgtattgcctgatgccgttaaaagacgcgtagtaatgaaaggttcccaaaaacaaaaagacactcagctcaaacggcctgccatagtcggcgagtgtcttcataataaagctgtaggtcacgaccgccaccgtaaaatacatgatttgaggatcttccgtgatgaaattcatcagccaaaggagtgcggtaaaccccggatctgtcgctgttttcgctgtgccgaaaccgaatatctgccacacattttgataatcgcccgccaattcgtacagcagcgtgtacgtctgaaaatccgtgccgactcgatagcggagacctgacacgagcacaagtgaagcgagcggaatccagatcaaaagcttattcggccgataccccgtggcaagcgaatcgtcacggccgccgcacattttagcgaaccaagaccaaataaatacaatccccatattgacggcatatacaatcatcggttatggtccttttccgtgctgatgttgtatacattcagcagcgctcctacattttgctgtgcatcgtagccaagttgagcgagtgtttctttgatgaactcacgcttcggcctgcctgcggcggccgcccttgcaatggtttcagcccagacgctgatcggttcagaaagacttaatcttgtgacaagcccgagaccggcgtcgactttttctgtaatgctgcctgaaatgatgcatggaagccccgacgcctgcgcttccacaagcacaaccggcaagccttcgtacagagacggcatgacaaacacatcaaatgtgcgcatcaattcatggatccgttcttcagtgcctaaaaagagaacatctgatagcagattctgccggcgcgcctcctcctctatctccccgcgcaacggcccgtctcccgccagaacgagctgaaagcgaacgcctctttccttgagatgtgcggcaagcttcagcaggaacgcgtggtttttcacttcatgaaaccgggccacatggccgatgatgagccggtcggctgcaatgccgcgtgctgctttttcttcatcagccgcctgcccatttggggcgaacaactcaaggtcaatcccgttaggaagaaggtgaacacgctcccgctccatattggactgtccaaataaaaacctgcccgcatcctctccgcaggcacacagcgctgtcgcatttgccaaaatgagccgcctgaacacgagcagctgcaagcgatccttccagttgaagccggtcttccaagacgtattgtgggaatggcataccctgaccggcactccggcgagccttgccgcaagggcgataaaacccgtttggaaatccgtgtgcgcatgaacggcgctgaacggcccgttttcttttatcgcttttctcacattcctcacaaatgtaaggggattgctttgcccaatgctcgggacataaaaaagacgcccgcctaaagataaaatctcttcatcataagcgcacggatcatttcgatacgttaaaaaatcaaattgcactttgcttttgtccatcttccgatataaattcattaccatggtttccgcgccgcccctgttcatgccactgagaacatggagtacgcgcttttggctgctattcatgcttgacaagcccttccttttggttcatcactctttttttatggtagcgattcatcacggctgcaggcataaacgcgcggattaacggttttgcgatatatatgtaatcagataaaggaagcttcaagcgtctgcacgcctgatagacaaggatggcattgtcaattgaatacgtaaatgaccgccgtttgaatgcatcgctgtcttccctcactttatacaaggcttcctgaagattatagcccctgaagccctcttcaaaaaagcgaagccacaaatcaatatcttccattcgtctcgtccgccgcaccgaccggtagcctttcagcgtgcggtaggcactcgctctcatcataatcgtgccatggcaaaatggggtcccttttgccatgatgcccggctccggaacagaaggcagaatgcgggcgcctcttacgccaaattcatcaaacacaagcatgccggtgccaaccacctgataatgtcggtgcttttctaaaaacgcgacctgcttttccagacggcgcggaaacgaaaggtcatctccatcctgacgtgcgatataatcgcctgtcgcatgcgaaagacaatgatttaatgatgcggcaagccgcttatttgttttgttttgaatcagtttgatgcggtcgctgtaatgagcggcatactgcttcgcgatgcggagcgtgccgtctgttgacgcatcatcgcacaaaatcagctcccaatttttataggattggctgagtatggattctatgctttctgccaaagtgcgttcgcaattataaatgcccataatgacagaaactttcggtcctgagttcatacgcttttctcctttgtatccatatccatgtacgcggaataaatatctgccatttcttccaccgttcgcgcctccgagaagcgcaaggctgtttttcggccttcctgtcccagctttcggcagagctccggcttatggtaaagctgttcaatccggcgggcaaaagcagcactgtcaccgattttgaccagaaaaccgttttctccgtcgcgaatgatttcccgatgcccgcgattatctgtggcgatcgccggtttttctgccgccattccctcaagcacattcataccgaggccttctctaatgctggatgcgacagatacatccgcaagctgaatcaactcatgtatgtcgctgcaaaagccgtaaaaacagacattggcggaggcaccaagcttttcagctaacgtttgatacgtatgttccattgccccttccccggcaaacacaaggcggagtgagggaattttttcttttagcaaggctgcggcttcaattaactgcttctggtttttgttcagattgagctcagccggataaaccaatataaaatcatcttcacggaacccgtgcttttctctgagtctttgctgctctatcggactgacaggccggaaacgctcggtgttgacgccaatgccgtgaattttctgcgtccttccgcccggcctttgaagtcctttcgcccgtatgtaatcctcttcattaatcgtaatcaggcagtctgtatatgctgaaagccatttctcaaccggatagtaaagaagccaatttttcatcggtgcccctttgcagaagtgaaatccgtgtgctgtgtacagcacctttgttccgtgccgccgtgcctgcctcgccgccagtctggcgagaacgccgccgaccggtgtatggcaatggacaatgtcgtattcataggtgtcaatcactttcttcagctgcctataaacggccaggttctgagggtcaaaaggtgacctgcgaatcgggatggagaatttctcatccacatacggcagcttggtttgtccgttcgcagcgacatgaacctcccagcccatttgtttgaaccatttaaaataagggaggtgaaaggccttaaaatgataatcaacagtcgcgcaaaacaatatctttttcgtcattttcactccccctaatgaacgctggcagccgtcatttcttctgatgtattgattgccgcaaacagcctcgctctcaggtcggcttccggcagctcatgaaaatcctcgataaagcgcatcagcaccggccaatcgccgtccaccgctttaccgatgtgaatttttggaaagatttgttcagcatggacttcatttttgttcagcaattcttcatacattttttcgcccggacgaatgcctgtgaattcgattggaacctgctcagtcgtgtagccggacaaatgaatgaggtttttggcaagatccacaatctttacgggctctcccatatcgagaacgaaaatctgacgccctttcgccagtgccccagcctgaatcacaagccttgatgcctcgggaatcgtcatgaaatagcgggtcattgccggatgtgttactgtcaccggaccgcctttttcaatctgttttttgaaaattggaatgacgctgccgcggctcccgagtacattgccgaagcgaacagcgacaaatttggttctgctgactttcccaagattcataataatcatctctgcgaatcgttttgtcgcccccattacgttggctgggttcaccgctttgtccgatgaaatcagcacgaatgtctctgttcccgacatatcggctgcttccgcgacattttttgttccgataatattgtttttgaccgcctcttctggattgtgttccattaaaggcacatgcttatgggcagctgcatgatagacaacatgcggctcgtattttttcatcaaggtaaacattttatcgcggtcctgcacatcagcgatttccgtatggaacacaatgtgtttgccgaatcgtccgttcagctctgtataaatcgaatgaatgctgttttccccatggccgagcagaatgatttccttaggctgaaacgcgctgatctgacgacagatttccgagccgattgatccgcccgctcccgtgacgagaactgtttttcctttgatgcggttcgaaatttcgctagtgtcgagggttaccggctttctgccgagcaagtcctcagcttttacatctctgatttgtccggcagttcgtgtgccaagcagcatttcatcaaaatgaggcataattttaatgtttactccggttcgcacacattctttatataacacctgaagctcatgggtgcggagtgaaggaatggcaataataatataattaattttgagcttttgcaccgcaggcatgatactttcttttccgccgattacgggcagccccataatttctaatttatgcttcgtttggtcgtcatcaataaaagcgacaggtatgatatcaggttcatctttcgaaagcagctgcctgaccatcagagtcccacctgagcccgccccgataatcagcgcgcgggacgaggcgcagcgttttttcctgatgctttcgtttaatactctggataaaatacgggtccctccaatagacaaaagctgaagcacccagcacgcggttaacagacggaagaacatcgtgtgatacacagcatactgaatgacgccggtcacagcggctgaaagcgtaatgcccttaagcaggacaatcagctcgccaagcccggtgtatgtccacacctgtttatactgattgaacaggaaagcacacacatgatagctgagaagcaagctgacagcagtaagcagtaatgctccggagtcataaaattgataggaatcttttaaaaattgatatcctgcaataactgaatttaaaacgaggtaagtatccagcgcaataatcattgacagtcttctccggtaactcaaccttttcccccctaattcttttatcggtttagctgcggcggttttcgtctctccaaaaaatcggcagcagctaaaccgacaacacgtcctatgtatatatcagataagtgggcatttaacccatcctcacgccccgccagcgacgaccagcatctaaggcagcaacttcagctgcccacagcagagccgagtgcctccattgatacaggtcaggagacatcacctttacaaaaactagtaggaatagtgttccgattttttcattttctttttgtttaaaagagcgcctaacagcttcgcattggattgttccagtgcatcctttgctttcagaacggtatcggtttttgtttttccgcttaaaacgacgagcacgctgccgtctgtctgatttgctagaatctgagcatctgcaacagccaaaagaggaggggaatcaaagatgacgaggctgaattgttcatagatctcagatattaaatctcccattgcttttgaagacaacagttctgccgggtttggcggggtcggcccgcttgtcagtacatataagttatcgatcggcgtcttttgcaccgtctcactgagtgaagcattgccgaccagcacatttgtcagcccggttacattatcaacctgaaacgtctgattgatggtcggctttcttaaatcggcatccaccagcagtactttcttttcctgctgctgcgcaaagacagccgcaagattcgctgcactgaacgatttaccttcaccaggcacagaggaggtgacgaggatagatcgcaagttggtctggacagatgagaactcaatgtttgtccgaatggtgcgatattgttccgcaacaactgatttattgtgtaaaacagatatttgagccaaacctcgccttgctttcttttttctaaagatcactcgcttcactccccgaaatgttttatcccacgattccgccctttgtggacatcaggaacggagcctaagcatggcaatccggttctctcgctgagctgccgtgcgcttttgcaagtatcatcgagaaaatgcagaaaaaatgccagtgtaatgccgcccatgacagcagcgccaaaagccatgaccatatttcgcagcctggccggcttgatcatcgggctttcagaagccttcgcctctgataatatatgtacgccttgtacattcattctttcatctacttctttttcaaacttgttcactaacgtgttcgcaatctcagccgctttcgccgggtcgtgatcctggacggcaacgttgataatttctgattcattttcactgctggtaaccacttttcctttcagcgaggaagccgattcagataggtgcaattccgccttaacttcttccatcaaggcagtgcttttcataatcgattggaacgtgctgctatactgaagatttcgctggatgtcactgagattcgagttttcttcaccgtctgattcatgaaccagcacctgtgtcgacgcctggtaggtcggtgaaatgaccttaaattgcacaaaacccataataagggtgacgccgattgtgatgagcagaatcagcacgaatctgtgtctgacaatcgcatataattctttgaaactcatattctcattcatgtattcatagccttcagccttcccgcggctggcttcccgcgcccctttctgttaatgattggattataaaagaaaacgttattatttaaaaattgcaaaataagccaataagttctctttagagaacaaaatcatgattttcctctaatttactgcacttcccttattattttaaattttataaagaacgaaaaattctttataatgaacaaaataacgacaggaatagaggagaatttcatattatgattggaagaattatccgtttgtaccgtaaaagaaaaggctattctattaatcagctggctgttgagtcaggcgtatccaaatcctatttaagcaagattgaaagaggcgttcacacgaatccgtccgttcaatttttaaaaaaagtttctgccacactggaagttgaattaacagaattatttgacgcagaaacaatgatgtatgaaaaaatcagcggcggtgaagaagaatggcgcgtacatttagtgcaagccgtacaagccgggatggaaaaggaagaattgttcacttttacgaacaggctaaagaaagaacagcctgaaactgcctcttaccgcaaccgcaaactgacggaatccaatatagaagaatggaaagcgctgatggcggaagcaagagaaatcggtctgactgtccatgaagtcaaatcctttttaaaaacaatgggaagatgatgatcggttaagggctaacgttcgcatctatagggtaaatctgtttataatgggggaaaaagggagagaacacaatgactcatcaaatagtaacgactcaatacggcaaagtaaaaggcacaacggaaaacggcgtacataagtggaaaggcatcccctatgccaagccgcctgtcggacaatggcgttttaaagcacctgagccgcctgaagtgtgggaagatgtccttgatgccacagcgtacggccctgtttgcccgcagccgtctgatttgctgtcactttcgtatactgagctgccccgccagtccgaggattgcttgtttgtcaatgtatttgcgcctgacactccaagccaaaacctgcctgtcatggtttggattcacggaggcgctttttatctcggcgcgggcagtgagccattgtatgacggatcaaaacttgcggcgcagggagaggtcattgtcgttacactgaactatcggctggggccgtttggctttttgcacttgtcttcgtttgatgaggcgtattccgataaccttgggcttttagaccaagtcgccgcactgaaatgggtgcgggagaatatttcagcgtttggcggtgatcccgataacgtaacagtatttggagaatccgccggcgggatgagcattgccgcgcttctcgctatgcctgcggcaaaaggcctgttccagaaagcaatcatggaaagcggcgcttctcgaacgatgacgaaagaacaagcggcgagcacctcggcagcctttttacaggtccttgggattaacgagggccaattggataaattgcatacggtttctgcggaagatttgctaaaagcggccgatcagcttcggatcgcagaaaaagaaaatatctttcagctgttcttccagcccgcccttgatccaaaaacgctgcctgctgaaccagaaaaagcgatcgcagaaggggccgcttccggcattccgctattaatcggaacaacccgtgatgaaggatatttatttttcaccccggattcagacgttcattctcaggaaacgcttgatgcagcgctcgagtatttactagggaagccgctggcagagaaagctgccgatttgtatccgcgttctctggaaagccaaattcatatgatgactgatttgttattttggcgccccgctgtcgcctatgcatccgcacattcccattatgcccctgtctggatgtaccggttcgattggcacccggagaagccgccgtacaataaagcgtttcacgcattagagcttccttttgtctttggaaatctggacggattagaacgaatggcaaaagcggaggttacggatgaggtgaaacagctttctcactcgatacaatcagcatggatcacattcgccaaaacaggaaacccaagcaccgaagctgtgaattggccggcgtatcatgaagaaacgagagagacgctgattttagactcagagattacgatcgaaaacgatcccgaatctgaaaaaaggcagaagctattcccttcaaaaggagaataaatatggggaaaacaggatacattggtgctgccattgttgtggcagcttgtatcattattttgtcggccgtggtatgtttacgggacacagtctattaccagcctatgcgctggactggcatcatactgtttttcgtgggaattgtgatggttcccgcatactcagcaaaaagaaaacccggaaaagagaagtaattctcttttccgggtttttatgtttattataatcttcccgcgcgaatatcgtctgtcattccctcataaggagccttcgaaatcacttcttcgttgtcgactccttcatttttcagaaatgtaatttccgcaaattcaggtacaacgtattttggatacgtttcatatttttcgcgggattcttccatcaaatcaatgtggtcattttggtagcaaaccgtaatttcaggatgttcatgcacccatttcgggaagaaaataatgccgtgcatgcgtttttcatttggcataaagtttaatgaaacatccgtgccagtcggctctgtccaagacactttatatacgccttctgtcagtttgacaatattcacttcctgatcccgaacccagcgtccggcaaccattccgctatgaattctataatcaattgtatggtcatttttaatataaatctcgtattcccagccgttttcatacgtataaatcatgtggcttccgataaagttttccatttttcacactctccttagtcttttactgcacttcataaatgtctagtcgaacgtaatcaggggttctttctgcggaaccgataaacaagcggtcatggagccattgatagactttactgcctgtttcaaacgtcggtaccgtacgaaaataaacatgctccggatcaatgatttccccggctgccgcttgttttcgaaacggctcgctgacttgccgtattccattgttttcaatgtaaatcagttcatgatctgctgtttcgatcacatacctggcagataaatcgtttctgccgtcagcgcgaatcatttgcgaatcggcaccgctcggcaaaatacgtccctttacttccccggttattgttcccgaacgaatcggaatgaatcgtctcagtcccaggcctgtctcaccaatcgtgataggcggatcaaccttgatttctaaagaggcgaatggttttaaaaccggcttcttcacgagaaccacctcacctccagaaaaaatcatgtaactatttacatgtttaatttaacactattgcagttaactgtcaaacaataggaacataaaaaaacaaggactgtttgaagacagtccttgtctgaagctagctttgataagcaagatatgtgctgacagtgcttttggcaagacaggcagaggaatctataatcggaatctcactttgaatatgatctaacaccgcatttaaatccgtgcaggctgaaatgatgatgtctgcatgctgactgatttcttcatatagcgtctgccacaatgcttgtgtatgctgcatatgatttggctgtttgattgcggcgataagctggttcacagcctgctgccaatggtccttgtgaacaacttcttgtccatttgccttcagaactttttggtagatggcggattggatggttggctctgttcctaaaaccaccgctttttttgcaggatgcggaatctcttttatcgtttcctcaacgatatgcaacataggaaccgacaatgcctgctgaatctcttcatagtagacatgcgccgtattacaaggcagcgcaatgaaatccactcctgttttctcgagctttaccgctccgtcgataatcgcttttttcatctcgtcatggtcaattggacgatctgcatagaagggcgtcgggcatgaatagatcatcatgtgcgggtagtcaatatcgtttgaagccccatacagcttctgacagtaatcaatcaccttatcaataaacggcgaggtcgatttcggccccattccggctaatattccgatcatcaaattcattcctttctaatttgtacggaccgcttcttcttctgagccatcctcatagaggataaagcttttcgcagcatccccgcctaacataaactcgacttcaacagacaatgctcgcagaaagaaacgggtttccgaggaaggaaataactccagtctcagctgtccggtgatctccaaataaagccgttcattctcggctgtcacctgtgcagccgttccatcctgcaacaggtagctgccaacatagcggctgtatatcgccgtatcaattgcttttttctttttatcagcaggacgttccgggacctcatatggctggccaaatagaatatgttccgccgccttcagaatcgcttgttcatattcagtatcctcttccttattactcaaatagatcagtgttttacgatgatcgatatatcggatcatcaacgtcgaatagccgggccatcctccgctgtggctgacaatccgccctttttcaggactattttgcagtacccagccaaagccataatcaattgtttctccattgttgaggcgcactggagaaaacgcagattccttagaagccttgctgatgaaatcgtcctgatataaagcctgatcaaatcgaaacaaatcgcttgtgacagagttcaccgtcccatctccctgtatgccatcgagatacacaacatagttcgtttcctccagctcatcagggaggacgtatgtttcggaatgtacatcatacacatatccatatgcataatgatcaattcgctcaggcgaaagcctcctgttatacactcttgtttcattcatgccgatcggtgaaaaaatacttgttttcataaaatccgcatagctcatgccagatgctttttcaatgataaccgccagcagcacataccccgtattgctgtacatccagccttcattcggttcaaaataaccagatagcccctcattcatcagcatatcgacaatatcctgattcaccgcaatcttgtgtgaatcccaattggcaaaaaaccatcccatataatcaggaagccctgacgtatggttcaataaatgccgaatcgttacgccctgatacggaaaaccgggcagccagcgatccactttatcctcatagccaagaatccccttctcctccagcaagatgattcccaatgctgtaaaaggctttgacaaagacgctaactcaaacaaagagttggttttcaacgggcgtttttccgtcatttccgcatagccaaaagagtggtgatataaaatatcgccaccctccgcagccagaaccgtcccgttaaactgatgtttttcgcctaatgtctcaaataatgtctgaagatgctttcttttattctgtttcattcctccacctcccatatctctgtacgttactaacctactaacgtttcaaatattttgaaaaacccttcagttagagatcctttttaacccatcacatatacctgcggttcactactatttagtgaaatgagatattatgatattttctgaattatgattaaaaaggcaactttatgcccatgcaacagaagctataaaaaatacagagaatgaaaagaaacagatagattttttagttctttaggcccgtagaccgcaaatccttttatgattttctatcaaacaaaagaggaaaatagaccagttgcaatccaaacgagagtctaatagaatgaggtcgaaaagtaaatcgcgcgggtttgttactgataaagcaggcaagacctaaaatgtgtaaagggcaaagtgtatactttggcgtcaccccttacatattttaggtctttttttattgtgcgtaactaacttgccatcttcaaacaggagggctggaagaagcagaccgctaacacagtacataaaaaaggagacatgaacgatgaacatcaaaaagtttgcaaaacaagcaacagtattaacctttactaccgcactgctggcaggaggcgcaactcaagcgtttgcgaaagaaacgaaccaaaagccatataaggaaacatacggcatttcccatattacacgccatgatatgctgcaaatccctgaacagcaaaaaaatgaaaaatatcaagttcctgaattcgattcgtccacaattaaaaatatctcttctgcaaaaggcctggacgtttgggacagctggccattacaaaacgctgacggcactgtcgcaaactatcatggctaccacatcgtctttgcattagccggagatcctaaaaatgcggatgacacatcgatttacatgttctatcaaaaagtcggcgaaacttctattgacagctggaaaaacgctggccgcgtctttaaagacagcgacaaattcgatgcaaatgattctatcctaaaagaccaaacgcaagaatggtcaggttcagccacatttacatctgacggaaaaatccgtttattctacactgatttctccggtaaacattacggcaaacaaacactgacaactgcacaggttaacgtatcagcatcagacagctctctgaacatcaacggtgtagaggattataaatcaatctttgacggtgacggcaaaacgtatcaaaatgtacagcagttcatcgatgaaggcaactacagctcaggcgacaaccatacgctgagagatcctcactacgtagaagataaaggccacaaatacttagtatttgaagcaaacactggaactgaagatggctaccaaggcgaagaatctttatttaacaaagcatactatggcaaaagcacatcattcttccgtcaagaaagtcaaaagcttctgcaaagtgataaaaagcgcactgctgaattagctaacggcgctctcggtatgattgagctaaacgatgattacacactgaaaaaagtgatgaaaccgctgattgcatctaacacagtaacagatgaaattgaacgcgcgaacgtctttaaaatgaacggcaaatggtatctgttcactgactcccgcgggtcaaaaatgacgattgacggcattacgtctaacgatatttacatgcttggctatgtttctaattctttaactggcccatacaagccgctgaacaaaactggccttgtgttaaaaatggatcttgatcctaacgatgtaacctttacttactcacacttcgctgtacctcaagcgaaaggaaacaatgtcgtgattacaagctatatgacaaacagaggattctacgcagacaaacaatcaacgtttgcgccaagcttcctgctgaacatcaaaggcaagaaaacatctgttgtcaaagacagcatccttgaacaaggacaattaacagttaacaaataaaaacgcaaaagaaaatgccgatatcctattggcattttcttttatttcttatcaacataaaggtgaatcccatatgaactatataaaagcaggcaaatggctaaccgtattcctaacctttttaggaatattgctgtttatcgacttatttccaaaagaagaacatgaccaaaaaacaaaatcaaaacagaagccggactaccgggctgcatatcattttacgacgccggataaatggaaaaatgaccctcaaaaaccgatctattttgatggcaagtatcattatttctatctatataaccgggattacccaaaaggcaacggcacagaatggcgccatgccgtctcagaggatttggtgcactggaccgatgaaggcgtggcgattccgaaatatacaaacccggacggtgacatttggaccggttccgtcgtggttgataaagagaacacagccggctttgggaaaaatgcgcttgtcgcgattgtgacacagccctcagccaaagacaaaaaacaggaacaatatttgtggtacagcacagataagggaaaatcattcaaattctacagtggcaaccccgttatgcctaatccgggtacagacgatttcagagatccgaaagtcatatgggatgaccaggataacaaatgggtcatggtcatggctgaaggatcaaaaatcggcttttatgaatccgataatcttaaggactggcattacacaagcggattcttcccagaacaggcgggaatggtggaatgtcccgacctctacatgatgcgggcaagcgacggaacgaataagtgggttctcggtgccagcgcgaatggcaaaccgtggggcaaaccaaatacgtacgcctactggaccggaagcttcgacggaaaagaattcaaagcggatcagactgaagcccaatggcttgactatggcttcgactggtatggcggtgtgacgttcgaagacagcaaaagcacagatccattagaaaagcggtatgcgcttgcctggatgaacaattgggattatgccaacaacaccccgacaatgaagaacggctttaacggcacagattctgtcatacgcgaactccggctgaaggagcaggatggaacatacagcctcgtctcacagccgattgaagctttggagcagctgactgtttcaactgacgaaatagaggatcaggatgtgaacggatcaaaaacattgtcgataacaggtgatacgtaccagcttgatacggatctttcttggtcagagctaaagaatgcaggcgtcaggctcagagaatcagaagaccaaaaacgccatattgatgtcggtattttcgctgaaggcggctatgcttatgtcaatagagcagccacaaatcagcctgacaaaagcaatacctatgtcgaaagcaaagctccttatgatgtaaacaaacgtaaggtgcatttgaaaatacttgtcgataaaacaacgatagaagtatttgttggcgacgggaaaaccgttttttcaaatgaagtcttcccaaagcctgaagataaaggaattaccctttattctgacggcggcacagcctccttcaaaaatataacagtgaaacactttgattcgattcatgaataaaaacaggggcagcgcaggctgccctgtttttttattaggagcggtattctctgttacatattgggcattgtaagaaatataaggctggtttcaaaggaggaagcgaatgtctaaacaaggaaattttcaaaaatcaatgtcgctgtttgatctgattttgattgggatgggagccatctttggatcagcgtggctgttcgctgtcagtaatgtcgcttcaaaagcagggccctccggcgctttttcctggatcctcggaggagccattattttgttaatcgggctcgtatatgcggagctcggagccgctctgccccgtaccggaggcatcattcgataccccgtttattcacatggccaccttgtcggctacttaatttcgtttgtcacgattgtcgcttatacaagcttgatttcaattgaagtgacagctgtgcgccagtatgtggcctattggtttcccggcctgaccattaaagggtctgattcgccgaccatttccggctggatcttgcagtttgccctattatgcttgtttttcctgctgaattattggagcgtcaaaaccttcgctaaggcgaatttcatcatatcgatttttaaatatattgtgccgattaccatcattattgtgctgatctttcattttcagccggagaatttatccgttcaaggatttgcaccgtttggatttacaggtattcaggctgcaatctcgacaggcggcgtcatgtttgcgtatctcggcctgcacccgattgtatctgtagcaggtgaagtccaaaatccaaaacgcaatatcccgatcgctttaatcatttgcatcatcgtttcaaccatcatttatactgttttgcaggtcacctttattggtgcaatcccgacagaaacactgaaacatggctggcccgcaattggccgggagttctcattgccgtttaaggatattgcggtcatgctcggattaggctggcttgcaacgcttgtcattttagacgccattctgtctcccggaggaaacgggaatatctttatgaatacgacatcccgccttgtttacgcctgggcgcgtaacggcacattatttggcatattctcaaaggtcaataaagatacggggacaccccgcgcatcgctttggctttcgtttgccctgtccattttctggacacttccctttccttcgtggaatgcgctcgtcaatgtctgttcagtcgcgctcattctttcatatgcgattgcacccatttcttcagctgcgctgagggtcaacgcgaaggacttaaacaggccgttttatttaaagggaatgagcattatcgggccgctttcctttatatttacagcgtttatcgtgtactggtcaggatggaaaacagtctcctggctgctcggttcacaactcgtgatgtttttgatctatctctgtttcagcaaatatacgcctaaagaagatgtcagcctcgctcagcagctgaaatcagcctggtggcttatcgggttttatattatgatgctgatcttttcctacatcggttctttcggacatggtttagggattatcagcaatcccgtcgacctcattttagtcgcgatcggctcacttgcgatttattactgggcaaagtataccgggctcccaaaagccgccattgattacgataaataaagaagcaagaggttttcttgcttctttattctttacaaacatacatacacgcgataaaatgaatgagagtcagtcattatcggaggtgttcctcatgccaaaacaaacatcgggcaaatacgaaaaaattctgcaggctgccatagaagtcatttctgaaaaaggcctcgacaaagcttctatttctgatattgtcaaaaaggccggcactgcccaaggaacattctatttgtatttttcatctaaaaatgccctcataccggccattgcagaaaatctcctcacccatacacttgatcaaatcaaaggtaggctgcatggggacgaggatttttggaccgttttagatatattaattgatgagacatttctcattacagaacgccataaggatattattgtcctctgttattccgggcttgcgatcgaccactccatggaaaaatgggagacgatctatcagccttattattcctggcttgaaaaaatcatcaacaaggccattgcaaaccacgaggtaacggaaggaatcaattcaaaatggacggccagaacgattatcaacttggtcgagaatactgcggaacgattctatatcggatttgaacaagatgaaaatgttgaagtgtataaaaaggaaattttcactttcttaaaacggagcttaggtactgcttaaaaaatgactgggtaacaccgctcattttttaatgccctaaaaatgactgacgttcattcataaaatagagaggtgtttcatttgaattgggttcttgtttttattgcagggcttttagaagttgtttgggcctcttccctcaaacatgccgattcgcttttggattggatcatcatttttatcttaatcgcggtcagctttatcctgttgatccgctcttatcaaaaaatcccgatggccgcggcgtacactgtgtttgtgggaatcggaaccgtcggaacatatctgactggaattgttctgggcgaatccttctcagcagcccaaatgttctttttagctttattgctggctggcattttaggaatgaaattatttacgaaagaaagcaaatctcagccgggaggtgaacaataatggcatggtttttattagtgattgccggcatagaagaaattatagctgccattgccatgaaatatatagacggaacaagaaaaaaatggccaatcattgtgatgactgttggattcggcttatccttttactgcctttcccaagcgatgatcgtcctgcctgccggagtcgcatatgccgtctggactggcattggaagcattggtgtttcggcggtcgggctcatctggtttaaggagcggtttcagctttcacaggtgatttcactttgccttatcctagccggcgtcatcggcctgcgtcttacgtcatcttcataaaatcaaggcatatacagctgtatatgcctttgccattaagcttcgtgatgtttttgaagatgaagcggcggtgggatgagccagcctttgttttttagcagccttaagtattttgcgccggttgccgctttcgacatatgaaattgcccaaacatcatggcaatatcctcacgaatcgattgccccatcattttgctgcatgtcaccagacctgcagcattttctgctgccgcggaggccgccacatccggatcgagaaaccgtgcgccaggcggaatgtcgttaagatctgctgtcggcggttcaggagaagccggcggcagcgccaccccgttttctttcaggatcgtgctgacctgtttgatttcatcttggcatttctcaatagactcacgaagcagtttcttcaggtcgtcatcaccgacatgattcaatagcatttggtaattgccgaccattttattgcccgccatcacataactccacaagccgaatacctcaccgtaatgcatcggttcatcctgcggatttccgcttaaaatacccatgttcatcctcctcccatattcaatattgcacatttcataacgtgcccaagcggaggaacatttatgtttcagcggaaaagatttatgaaatgaaacaaaacaaaaaagacaagagtggcaagttgccaaaccattgtctttcctgttgtttgattggacgcactgaagggattcgcaccccgacagacaagataccggaaaccattcaagtgctttttaatatgagtcattgattctgtctttaataaactttaacgagatggcgggatgctttgcggaaaacgaaatacattttcggggtcatatttcgcctttatttctcgaagccgcgcaaagtttgcgccataatattcttttccgaagttttcaatgttttgatctggaacattaacatatgaacctgctacatatggttgcatcagctgacgcactctttcaactgatgcaagatttgaatcttcttgtgatttatttttccaactagccgtccattccgtataaaatattggatggcgccaaaaaaaggcagtttcgtctttagggactctgcttatagcaccaccccaattgataaaaaagaaattggcatctgttccagtagcgtcttccaaaaattttctcatgattgaaatgggttcgtcagaccaaaaatcatgaccccaagccgaggagaatttaacactctgatcatttctgccagggatgggttcgtcagggtctaagaaatctatagcatctggatagtataatgttttgatatctgcttctgttggagttcccgcatgtaataaaggttttaataatcgaatcaattcagttttcgaaccgaggaaaattccttctgcatgacacaaaccatttattttgctgtaaatttcaaggtagcatcctaatcgttcatctacaaacggagcccatttctgccaagctttaaataccgtttctaattgttcccacggccagataatattgaagacggttgcagttttaggggcacgatgaactttgaatgtatattgggtattatatccaaagttacctcctcctccgcctctagaagcccatagcaaatcctcattgtgagattgatctgcatgaataatccttccttttgcatctaccgttttcagcgcgagaaggttatcacttataaggccaatcgatcgtgagagtacaccaaatccgccgcccatcgtaattcccccgattccaactgttgggctatctccaaacggagccataaaaccgtctcgagctaatccctttacaagcgggccaacgggaataccagtttgaacggttgcaatcgcgttttcttcatctaagaaaactttattcatgtcactcacatcaataacaattcctccacttactactgaaaggttcttatctaaagcatggcgaccgcttctgacacgtaagggcactttattctcacgagcccatttaatggcattacttacatcgtatgaattttgcgcaaaaacaaagacaagaggatagacatccacataagggttccaattcttaatagcctctgtatagccggggtctcctttgaaaattacacgccctgtcaactgtgttgatcccatatattatttcactcctaaagaaattcgattcagatactaaaatatgcaggagctggataatcgcatagacaaatgatctacgaactataaatataatacgctaaggcctttttcgtcggtaaggtctgctgagaaacatttttcaaacaattttgagcaaacttcctgtccaatcctccaacaagcgttttttcttatcgtttttaggagcagtgtccagtttttttcggagtgaatattcgtttaggccaaaagaaaagagagatgaagaagtgtttagtaccagaggtatacatccatacaacagactctagatcatcatatactgaatgtatgtagaaaggagacatcagctttggcaaaatatcggattatgacctttgacggcggcggtaccttaggtgctttaagtttgcaactgttaaacagattggctaggcaaaacccgaagttaattagtcgaacccatgtattttcgggaaattcaatcggttcatttactgcccttgcattagcaagcggaagatctccgagggaaacacttcagtattttgaggatgaaatcctacccgcattcagcatttcccggccaggcggacctgttttcaaccaacaattaccctattccggttttattaaagcggtaagaaattttttcccagcagatcttcaacttatagatttaagaaaacgaattgttgtcccatcattcaaattatactctcaaaaactggatcgttggactcctgtcttatttcacaattttcccggctctccctatttaaatgagaaagtaagtgatgtcatactgcggagcagcggtgctcccgcgacgcaacgggcctatcaaaactatgtggatgggtatgtagtagcaacgaaccctagtacagccagtatcgcgtttgcagttggtaaagccaatgtgccattggatcaaattgcggtattgtccatcggaacaggtgaagccccgacccggttaagaagagatacgaagggatggggaatggtaagtgcagataacatccgccccgaaaatctgaagaaccttcctccaaattggggagttcttttggacaggtcgcctaatgaacctttactgccatttcttcagatgattgctggcggtaatgggtactatgaatccatggtcagtgcgaatcttctgggagatcgttttttccggttagatccacggattccgaacttctccaaaacggaccctgccgtcgttcccgctgtcattgaaattgcgaacaaaaccaacttacagcctgcgattcaatttatagagaagaactgggggagtaaataaatttttattttaaaactattctcacttatccaattttgtccgagagaagattctcaaaataaatacaggcaatgggtagaaccggatttttttaaaggtttgttaatcacaagctaataagatgaatgaaaaaatcaattcatacttcttcttttgaaagtgagggttcaaactaaagaatgtaattgaaatgttactctaaggtatgcaattccctttttcacacaaaaaagacaagagcggcaaatcgccaaacccttgtctttcctgttgttctattggacgcgctcggagggattcgaacccccgacagacgtggtaccggaaaccaccgctctatccaactgagctacgagcgcagaatgactgcgttatgagaacgtcagcacaactaattatacgataattccattcaaataacaaccctctatttcgagaggccgttttttaaatagacaaagcatcttaattggcaatctgacatacgatggtttgaacccctgtatttttggggaaaatgggaaaaagagacgactttgcatatcaggccagctttttgtttgacctttattgaccaaaaatgtatcatgtaactacatacttacctaaaaggtgaaggaggagcattatgaatttaatacctacagtcattgaacaaacgaaccgcggggaaagagcgtatgacatttattctcgtctattaaaggatcgtatcatcatgcttggatctgcgattgatgacaacgttgcgaactccatcgtgtcacagcttttattcttagcagcagaagaccctgaaaaagaaatttctctttacatcaacagcccgggcggctctattacagccggtatggcgatctatgataccatgcagtttattaagccgaaggtatctacaatttgtatcggtatggctgcgtcaatgggcgcgttcctgcttgcagccggcgaaaaaggcaaacgctatgcgcttccaaacagtgaagtcatgattcaccagcctcttggcggtgcgcaaggtcaggcgacagaaattgaaattgccgcgaaacgcattctcttgcttcgcgacaaattaaacaaagtccttgctgaacgtactggccagccgcttgaagtgatcgaacgcgacacagaccgtgataacttcaagtctgctgaagaagcgcttgaatacggcctgattgacaaaattttgactcacacagaagacaaaaagtaataacacaacctgcaagagctgcgtctcttgcaggtttttttcatttcaaggaattgactcccttaaacactttttgttctatactgctcccatccctcatgtaacagctcaagcgtcaaatcattcgtctgcctcacaaccagatcagcaccaagcatcggctgtccttgaccgacaccaaccgcaaacatccccgcagatttgattgcagaaatgcctgcttctgcgtcttctattgccgcgcaatcagcaggggaaacatcgagcatcgctgcagctgttaaaaagatgtcaggatcaggcttccccttcgcaagagtcgtcggatcaacaatggcatcaaaatcatcgataattgccaaacgtcttaaaatcttaggagcattgcgacttgaagatgctaacccgatttttatattttcgtttttcaattgacatagaagcctgccaatccccggtaaaagatcttccggcgtcaatttgctgatcagcatttgataatcgcgatttttccgatgcataagctcttgtttctccgcatttgtatactttgtttccgcaccgccaaagatcaatatgctttcaagtgactcttctctgctgattccttttagcctttcattcatgtctctgtcaaaagggatattaatttgttctgcgatgtgcttccaagcgagaaaatgatattcagcagtatctgttatcactccgtctaaatcaaaaatgaccgctttcatatactaatgcccatcacagcttcataaggtttgaggctaatactctttaagtccgcccgctcctgcggatagtttgaaatcagcactttccaacgctcatgaatcagttctggaggcgcttcgaacagagccttttcttccgataaattcacaacgacaagaagcttttccccttgatattctcgaaggtaagaaaagacctgcggatcattctcctgcaaaagctgataatcgccatatatcataatcttatattgctttcgtaattgaatgagcttctgatagtaaaagaaaatcgaatcttgatctttcaaggactctttcacattgatatcttggtagcgggaatttaccggtatccacgggtttccggttgtgaatcccgcatgttttccggcatcccactgcataggtgttctcgcatgatcccttccttttatcatcacggctttgagaaactctttttctgacatcgttttgttttcgacgactagttcacgatatgcattctttatttcaagatcatcatacatctccagcggcatatcgctgttgaccatgccgatttcttctccctggtaaataaacggcgttcctttcatgccgtgcagaaccgttgcaaatgccttcgcacattctttacgcagcttcccatcattgccccagcgggaaataaccctcggctggtcatggttctcaaaatacagggtattccagccgacattcattaacccggtctgccaccttgtcatcgtcttttttaaagcaatcaaatcaaacggcttgatctgccatttcccatttggcgagttttgttctgtatcaatatccatatgttcaaatgtaaagatcatattcagctcttgcctgcttgcatctgtgtactttttcgcctcttcaatatcagagccgtttgcctctccgactgtcatgcagtcgtaatgagaaagcacttccctgttcatctcttgaataaactcatgaagacgggggccgttagagtgataacggccgacaatatagctgcggctgtgatccgtttcgtagtccggaaaatcggtgtatttagaaatagagccgatcacatccatccgccagccgtcaacgcctctatccatccagaatctcattacatcataaacttcccggcgaacggcttcgttttcccaatttaaatcaggctgttttttcgaaaagtagtgcaaataatactgctctgttccttcatcgtatgtccacgctgagcctgaaaagatcgatccccaattattcggctctgagccgtccggtttaggatctttccaaaaataataatcccggtaaggattgtccttcgacttgcggctttcagcaaaccaagcatgctcatctgatgtgtggttcacgaccaaatccatgacgattttcattccgcgtttatgggcttcatcaatcagctgaaacatatcttcatttgtcccaaacttttcgtacatgtttttgtaatcgctgatatcatatccgttgtcatcctgcggggaatcaaataccggggagagccagatgacatccgccccgagatttttgatgtaatccagcttttgaatcacaccttgcaaatccccgaatccatctccattggcatcataaaaactgcgcgggtaaatttgataaacgacagcttctttccaccattcactcattaggcgttctcctttcacatcgtccctgtaggacaactggttcctcataaacgttcatgtgcagcggctcgccttttacaagctcaaaaataacgcgcttttcgtcaaccgtcacattgattaatcgatttcgataattgatgttgaatgaatattcgtcccattctttcggcaaaaacggagcaaatgacagcgtctcattcgcggtgcgcatgcctgcaaagccatgaacgattgccagccagctacccgtcattgaagtaatatgcaagccttcttccgtatcatgattgtaattatcaagatcaagccttgctgtgcgcttatataattcgagcgctttcttttccagcttgagttcggctgcgagaatcgcatggacagagggcgataggcttgattcatgaacagtcatcggctcataaaattcaaagtttcgccgtttttcttccattgtaaaacggtcattaaaaagataaatgccttggagaacatctgcctgcttaataaaattggagcggagaatcttgtcccatgaccaattctggtaaagaggccgttccgctggatctaattcgtcaactgcttgcaggtctttatccaagaacgtgtcatgctgaacgaaaatttgcagttcttcactatacggatagtacatgtgctggatgatttctctccagactttcaattcttcttcctgtacatccagaaggcggcgtttctccgctgagatactttcgagactttgtagagtatactccaacgtccaagccgcaatgacattcgtataccaattgttgttaacgttgttttcgtattcattcggccctgtgacgccatggatcatatacttattttttcgtttcgagaagtgaacacggtcggcccaaaatctgctgactgccacaagtacgtctatcccgtattcttccatatagttacggtcgcctgtataattgatataattgtagatcgcataacagatcgcgccattgcggtgaatttcttcaaaggtgatttcccattcgttgtggcattcatcaccggtgaacgtcaccatcggataaagtgcccccttcatccccaattttgccgcgtttcgttcggcagcctccaactgatgatagcgatacaaaagcaggtttttcgtcacctccggctcggctgtcgccaaatacatcggaacggcgtacgcctcagtatcccaatatgcggcacctccatatttctcgccagtaaatcctttcggcccgatattcaaacgggcatcgcccccgtaatatgtcgagaataactgaaagatattgtagcggattccttgttgaagctcctcatctcctttaatctcaatgtccgcttttgcccatctttccttccatcgatcagtgtgcctccgttttgcatcttcatagccgttctctaccacatccgccaaaagctccttggctttcgataaaagctcttcctcccgaaaatcacgggaagtcgtgacaatcacaaactttttcaatgatgccttcgtttggtagctgtagcgattctcgacatacatttcattcgttttaaagcttttattgacaaaaccctccgtctcatttgccattgcggctaaaaccgtgaagcgcggtgttccaaatggattttcgatcgtttttgccgctaaatggccgctgtgagaatcagcacctttcgcttcctcctgccaaaactgttcttggtagttagaatcttcatttgccacatttccatccaggtaaggaacaagcgtaatgacagcatctcccgtcaggcactccgcttcataatgaatcgcacagagttcttttacagcaaggctaagaaaccgctctgacctgattctgacggatttatcctgaatgcggacaacagcgcttcgccgcagaatcccctctttcatattgagttctacctcaaatgattcgattgggttttgatggagatcgattttttcaccgtcaacatataggcctatgcccataaagttcatcgcattgatcacttttccgaaatattctggatacccgtttttccaccagcctactcgcgttttgtcggggaaccacacgcctgcaatatatgtgccttggtgactgtcgcctgaatagccttcttcaaaattccctctgacccccatatagccattggcaagagacgtcaggctttccagcagccgtgtatgctccttattaaatgtatttgttttgattttccattcatcaatctcaaataaccgctgatttatcatcatttcctcccgaatgtaagtttccattatcacggcgggttttggtcaaatatctaaatgcaaaagaaatcatcaaagtaacgccacacgaatggatcatcaatacagtaatcaaatcaaaatgaaccatgccgatagcagctgccgcaaatgccggcagtgccgaggcgcaaatcgccgtagatactgcttccttgaatgacgcaatagagatcatgtttgatatttttgtgatccagaggccacctgcaagaacaaacgttaacaaaagctggatcataaagattaccgcatatgccagcatcatgatcatcggcttatactgtgccaaccataatgtatcgatcaaaacctctacatcatggacgtttggtttctcgagcttaacgtccattttcgcatagccaacagaaaaccccgtttcgttttgatcggtgatcaccagttgatcaggttgaaatatgatagcgttttcaaatccagttactttcaatcgcccattttcaccgcttgtctcatattcatgcttcatatcgactgccatcacattctgcccatcttcaatcctctcagaactcttcccgcctgttagttttccgttcctgatttgaaaaccctgtaattgatcagcaaattgatcattaaccccttgaatcgctgacggcatgaaagatgcaacgctgaagcgatccattttcacaaacgaaaccgctaacggcgtcattaagcaggccgttaaaaacagaaagagaaaagagagctgcagccagctgaaagtattcccgtaacggcaaacacctgatggggatgcacccgccttcaggcagcggatgataaagcttttattctccagattcttcattggcattacccctttgttccgccggctgtcaatccggacacaaagttcttttggagaaaaaagaataagacgcatatcggcagcgcggcaagtatggcaccggctgcaaatagagctactttttgctgctgcggattagaaataaaggattgtaatcctacagcgatggtcagcctttccggtgagcgaagcagaaatttcgccagcaaatagtcgccaaacggtgccataaacgcccaaagcgcttgtaccgcgagcattggcttaacaagcggcagaacaattgaagcgaaaatcctcagatgtcccgctccgtcaattcgcgcggcttcatcaatttctctcggcacagtatcaaaataacctttcatcagccacgtgttcatcggaattccgccgccgatatagatcgctgttaaaaaccagtattgatcgagtgcgcctattagcatcgccaagacataaaaagcagtcagcgccgccattgtcggcaccatttgaatgattaaaaagaatatcaggctcttttttctgcctgcaaaccgatagcggctgtacgagtacccggcaagtgtcacaatcgtaacctgcaaaaccatgaccgatagcgcgatgacaagtgtattgctgtaccaatgaagataaagcgtttcttcaaatagccgcttaaaatgatccaacgtccaaggacccgaaaaatcgagctgaaaagccgccgaattccccacacggaaggctgatgatgccgtaatcagcaacggatatataatgacaatacttaaaagcgtcaaaaagaaatacgtacagattttattaagcattctggcagtgctcgcgttcacctacataacctcctcattgccaaaagcattcgattttttgaaagcaatcagtgaaattccaatgacaatgaaagaaattaacagtgtcacagccgccgcaacggaatattggggtgatgtgcctgttgtcagtttataaatccacgaaattaagatatcggtcgatccggccccggctcccacactgcctggccctccctcattaaataaatagatgatcgagaaattattgaaattaaacgtatactgagtaatcatcacgggtgctgtggcaaataaaatcatcgggaatgtaatatgccgaaaacgctgaataaaagtggccccgtcaatctttgccgcttcatacaattcacctggaatcgcctgaagcactcccgttaccatgacataaatatatggaaagccgagccacgtctgaatcataatgagggctgtctttgtccagaaaggatcagtcttccacgcgatcgcaggcagctcaacaaacggcaggtgattgaatagtggaatcacctgtgcattcaccgctcctatgctgtcgttaaacatgttggaaaaactcatgattgtaataaacgccggaacagcccatggaaataagaaaatcattcgaaatatccgcttgccttttataaaatcctgattgacgaaaagggccgtcacaatacctaaaatgatttgcagcgttgttgcacagattgtccagataaccgtccagcccagtacattcacaaatgtttcacgataggagccaaggaaaaaaatattcaagaaatttttaaacccgacccagtcaatcagacgattaggcggaatatgataaaaatcatagtttgtacatgcaacaaacagagtcaccaaaaccggaaagataatcacaaacaccatcatgatatatgccggcagtgtaaatagatatggaaaccctttatcgcccgcatgacagatcatatccttggctattgtattgacttccaaacccgccgctttcatagcggcggtcttacgtgaatcatgaatattaaagatatagaacatgaggaaaatcattgtcacgatcaattgcagcgtgccttcaatcagcataaacagcgagtggtcttcaccgggaacacttcccaatgtcatcaatccggttagcgcctgtataccgaaaacgcataattcaaaagcaaacaagcctgtaatggcaagaaataagagcccctttgacaattgctgattcgcaatctgcccaagtcctggaatgatcgataaaagccctgcctttcgtttttgctttgcaagtgtgtgatgtttattcattttttccgccctctattcttccggacgctatcccgccgttttatttcacatacttttctttaatattttcctttatgacgtttacagcatcattcgctgatgtttgtgtcgatttttttcctgaagctgcatcaaaaattaaactttccgctcctgtccatacttcagccatttccggaatatttggagtcggcgtcgctgtttcatattgtttaatcacagctgacgtcagttcattcttttgctcatcggctttcctccttgcggcagtgttggccggaacttcgtttgtattctgataaaaagcgtaagcattggcatcatttgcagcatactcaagccatttttcagccagctcgggctcttttgtatattttgaagctacccagcccttcccgcccgcaaaaggggcatattcttctccattgggcaatgtcggaatgggagccgctccgtagttcaatttagcctctttatagttggcagctgaccaaggaccgccaatgatcgcagccgctttgccttctaaaaacatctgctgaataaagtcgtctgcgcttgaattgtcttgcattcctttcggccaatatgtttcaaaccatttctccgcatatttcaccgcttctacagcccctttattgttcaggccgatgtccccggaatctgtgccgttttttccaaacacatatccgccgtaaccagccaataagccgtacgacatataaaagtcagtccattttgctaaaaatccggttgattttcctttttccgaagcaaacgcgaatcgaggatcttccgttaacttttcaaggtctttaaatgtttttggcgctgtttttaaaagatctttgttgtaatacaaaataagtgtctcaatgactagcggcattccgtacactttgccgtcaactgtcacctgctgcatttctttatcaccaaagctttttgtgttagatggcttaatatcaagtaaatgtccttgttgtcccaaaccgccgatccggtcatatgcagcaagcataacatcaggcgcattacccgccgggccatcaagaggaagcgcttctaactgttcgaacatttgcttttcaacaatttttactgtgacatcattctctttttcgaactttgtttttatgctttcaatgtattctttatacgtttcttcgacggacacagtcagcacctttttgccatcagcgcttgctggattttttgaacttgagcaggcggcaaggccgattgccaggaatgatgccgccaatatggcgaaccccttttttaaaagaaccatctcttttcccccttctatttacgaaactataacaattgtattgtcctatagaaagcggttacaacaacttttgatttgttaccgataacagaatgttatacaggggcggcagcactcaaaatcaaaaattctcccggctgaacggtaatgacatcgtgatgctgaagcggctgctctgtccatgcatcacagatcctcttattcctttcaatattcaaatccagtaaactgacatgttgaaccgcattcccttgattaaagaaataaatcagtattttttcatcaagagtccgtgaaaagctaataaaatcgttttggtcatccagcagattccactcaagatgtccttcagtcaataaagtgttttcctgcttgcgtaaagcaattaaccgtttcataaattgcagcatgtcttggttttgcttctctttttcccaaaccatacattttcggcataatggatcattttcgccgttcagcccgatttccgttccgtaataaatgcatggtgagcctgtctgggcaaacataaaggccagcaacgcgcgtgctttcttctcatcattgcggcatctggtcaaaaggcgctttgtatcatggctatccagtaaattaaacatcacctcattggcctgcttcattccattcatcaaatgtgcattgacacggtgagccatacgtgaagctgagatcgtctggtcagcaaagtattcaatcataggctctgtaaaagggtaattcatcgccgcatgaaattcatcccctctaagccagggttcggcagaatgccagatctcacctaaaatataaacatcaggcttttcagtagatacagcctgcctaaatgtcttccaaaaagcgtgatccacttcatttgcgacatccaaacgccagccgtcaatgtcaaattcgcgaatccagtacaaagcaatatcaagcaaatatttctgcacctcgggattagccgtgtttagcttcggcatatcagctgtaaaagcaaacctgtcataattgtcgtctgtgacgggaaaagagtgaatatggaaccagtctttatagcgggattgatctccgtttttgacgacatcctgccattgcggagacgcgcttcctatatggttaaaaaccgcatcaagcataattctcatcccccgctgatgcagctggctgaccaatgtacgaaaaagctcaggatccccgaaatgcggatcaatagaaaagtaatccagcgtgtcgtatttatgattagaaggcgcggaaaagatcggtgtcagataaatgccgttcacccctaaatcctctaaataatcaagcttgtcaacaattccttgtaaatcccctccaaaaaaatcattgacgcccgggtccttgctcccccacggcaatgcattcttcggtgacaagtcttctcttccatttgcaaaacgctccggaaaaatttgataccaaaccgttgacttgacccattcaggcgcttgaaatgtatcagcctcgtgaacaaacggaaatttaaagtaataatgaatcgtttccagtgttttttcgttataagggcatacacccgaacttccgaaaaagatgtcttcatgatcgtctgttacaacaaacgcatattgtaaacgcctaaatggcggcaccacttcagcaaaccaatagtcatgcatttctgtagcagcaattttcctcatcggctgctcgtttgccgaccacttgccgtcgttgtactcatagggatcaccccaaatgaatcgaatgtgatctgcatcacctttttttgtccgaatcttgatatgcacagcccgcccatcataagaataagcatctgtgctgaatggctggtggtgaatcgctgcatattccatcatgtttccccctttgatttccgttttattgaagccggctcatagtttgaaagtatcatgatgaaattgtgggaacaatccttttcaccctgttaccgataacagaataaggcgcttacagcgttgattctcgtacaattaactctggttcaaaaaatagacttccttgtgcagcaccgtcttcattcatttttttcagcaacattttcgcacaggcttcccccatttcaacaacaggctgtctgaccgtagtcaagcgcggcgaggagatgcgatcaagaaacacaccgtcattcccggtaaccgcaacgtcttccggaattctctttccaagggattgcgccgcacgaatgacgccgagcgcgattcgatcagatgcgcagacaaatgcggcttgattgtccatggatttcagcagttctcttgcaaggccctcacttttcttagaactgttgtcgatccgaaacatattcgattttttaaagcttttattcatcgcccgtatatacccctgttctcttgcacgttcgaaaggctcatctaaatcaatgccaaaaaagacaacttcccgctcccccagccccataacatggcgggttgccataaaagtgcctttctcgttattcacatcgataaagtcatagcccatttcattttgtccaaatacgacgagcggcttctcaaacgcttttattacaccttcaaaatcgttctttctcaagccggtggcaataatgccgtcacattggccaatattaagagaatttcttgtcacaagctggagagcatagtgattgcgatccagctccctgctgattcctgtcagcaggttcatgtaatatggttctgtcgtatccatttcctcaagtatcaatagtttcacaacctgtgttctgttttgcacgagcgctctcgccgcataattagggatgtaattcagctctttcatcgcagaatgaacaagctttttcaattcatctgtcaccgtctcagggtgattgatcactcgtgataccgtcattttcgaaacatttgctttttttgccacatctgacaatgttgccattttcatcccctccttatctgtgcttattatccaaactagtgataaagtcctctattactgttaaatatacgatgcaggcaaaagagaaataaaaaagagatttcccttaaggaaacctcactttgttaaaaactctcgatttttcatggattcatacgctaggtggcagactcattctctccacttccatgagaaagtctcttttttaaatttctgtccactttttttctaaaatcggataagaataattttgcatttgctcaattaactcatccggccgtgacgagctgtgaatcagttttaggtgcgattcgttagaaaacccttcttgaatgctgtatttcaccattttcatcattggttcaaaatatccgtttacattgtacagtccgattggcttttggtggatgccgatctgtgcccagcacagcacttcaaataattcttcatatgtaccaaagccgcccggcatcgagataaagccgtccgccagctcgctcattttagcctttcgttcatgcatcccgtttacttcaatcagctcagtcagattctgatggacaacctccccgctgaacaaaccgctcggcatgaccccgattgcagttccgccgttttccataatcgcgtcggcaatcgtgcccatcaagccgacgcgggagcccccatagacaaggccgattccctgctcagccatatacacgccaagctctgccgcttttcttttatacgcttcatttcccccagggtttgatcccgcaaatacacaaatggttttcatcttgtcatctccgcatctatatatcgtgttaaacattcaaaaacacactatatattgtcccatcttcatgtgataatatcaatatgaaatacataaagaatgcaggagtgatgaggttgcagctggctgatgcagaaaaatggatgaaagagttttacgaaaaaagaggctggacagaatacggaccttttattcgcgtcggctttttaatggaggaagccggagaattggcccgggctgtcagggcgtatgaaatcggcagagaccggccggatgagaaagaatcgtcacgcgctgagcaaaaacaagaattgattgaagaaatgggagatgtcatcggaaatatcgccattcttgctgatatgtatggtgtctctttagaagacgtcatgaaggcccaccaagaaaaactgacaaaacgatttgagcatgcataaaaaagcggccgcgatggccgctttttttaacctgtgatttcatcatggtgatcaaagaaatgctgctttcctattttgtgaaaaaggcctgttttatgcagcagctcctttggctgcgattgcaatcctacaatcatcagctttccattgtggcgtttaatccgattcataatgttcccaagcaccgcttcagctgacgtatccatatagtgcaccttattcatgagcagaatgagggttttcggttttttctgtacatgctccagcaatgacgattcaagggaatcaattgatccgaaaaacaacggtccttctatggcatacatgctgacagatggatcttctctcttcgccagaacaggatgcgattcctgattgtggatgcgggtcgcttcgctcattcttctgataaagaacacaaatgcaagcagcaatccggttgccacaccgatgattaagtcaaacagaaccgtaagggcgaaggtcgccgccaaaataaaggaatcagcgtttttcagtctcagcatgtttgcgacttccttgcgctcactcatattccatgcgaccaccatgagaatcggtgccatactggcgagcggcacatgggacgcataaggcgcaaatacaagcaggacaaggagaacgactacgccgtgaacgacgccggaaactggggaaaccgctccgttttttatattggtcgccgttctcgcaatcgctcctgtagccgggattccgccaaacaggggcgctgccatattcgcaattccctggccgacaagctccttattgctgtcatgctttgagcccttcatgttatcagcgaccattgcggacaaaatcgactcaagtcctccaagaagcgcgatgacaagcgcagccggaaacagcataaccattttatccaaagtaagctcaggaaactgaaattcaggcaaatggcgggggatttctccataagttgacccaatcgttgccatgcggtcagggaaaaagacaaccgcgaccactgtggaaataagaagcgccaacaaagcgcccggcactttaggcatcaccttggcggatacaagcaaaatgacgagcccgatcacagctgtcaaaatggcatatacgttaaaggtgccgagctgctgtacaatttcaaacatgttgtggtgaaagttctcatgtttttcaacatttctcaatccgagaaaattagcgatttgttccgtaaagatcagcacggcaattccggctgtaaaaccgacgataacgggtttaggcacgaatttcattatttttccgagcttaaacagcccaaacagcaccagcattacccctgccataaaccctgcgatcagcagattctctaatccgtactgcatgataatgccgaacagtatcgggacaaaggcgcctgtcggaccgccaatttgatatttagatcccccgaacaaagagatacaaatccccgctataacaacagtgtacagcccgtattcgggctcgactcccgaggcaatggcaaacgccattcctaaaggaattgccacgacacctactacgatacctgcaattaagtctttctgaaatttctgtaaattgtatcccttgaatctccctgagaatcgcatattttgttataacctcccttatgagtgattgtttattagctcagtttcataaccgttaatgaccacatcaagttttcctgtttcagggtgaatgacaagcccgtgaaccggcacttttttcggaagcagcggatggttcttaatcatgttcacactgtgggaaacgctttcttccacgctgtgaaaaccagtcagccacgttttcaaatcgagtccggcactcgtcagcaaattcaggcagctatcctccaccccgcgttcctttgctttctcaagaatcgaggacgcattcagccctgacattccgcattcatgatggccgacaatgcatacctcttcagcctgcaattcataaatcgcgaccagtatgcttcgcatcacgcttccaaatgggtgagaaacgatggctcccgcgttttttacaattttagcatcaccgtttttaagccccattgcttgcggaagaagttctgtaagccttgtatccatacaggtgacaatgacgagctttttcgaaggaaactttgtcgttttgtacggttcatacttcttctcactgacaaaccgctgattgtgttccaaaattgatgttaaagaaaccatttgattcatctcccatccatatgattttgcaagccttcttacccagcttacagtaaggaattatagcataggaataagccaagaaaaggctttcaaaaaaagacactataattggactgtagaatcaaaacataaacatttatatctttcaaagataataaaatttatatttaatgaatcctataatccggctgcagctcgcatattgatgatttgtctgacaaaaaatatgggtgaattctgataattaaaaaacttttttaagcagatatagctgttcgatcttcattttaagttcaaaagaaccagaaactaaaaaaacgcagctatatttttaacacctatttattttcgatataatgaaatagacaacagccataaagggggagccttgttgaaaccatttgtatttatcacaaaaccgattcctgaagagattgaagcattcatcggtgaacattgccgttatgaagtatggcaggaggatacgcttccgagtgacgtgctatttgaaaaattaaaagaagcggagggacttttaacatcagggacgtccgggccgtcaatcaatcgtgagttgctggaacacgcgcctaagctcaaagtggtcagcaaccaatcagtaggctacgataacttcgatatagaagcaatgaaagaaagaggagtcgtcgggactcatacaccttatacactggatgacacagttgcagatctggctttttcactgattctgtcttccgccagacgtgttgccgaactggaccgttttgtcagagcaggaaaatggggaaccgtggaagaggaagcgcttttcggaattgatgttcatcatcaaacgttaggcattatcggcatgggcagaattggagaacaagcagcgagacgcgccaaatttggttttgatatggaagtgctttatcataaccgacatcgcaaacaagaaacagaagacagcatcggcgttaagtatgcagagcttgatacattgctggagcaatctgattttattcttctcattacgccgctgactgatgaaacctatcacatgataggagaacgcgaatttaagttgatgaaggattcagcaattttcgtcaatatttcccggggaaagacagttgatgaaaaagcactgattcgcgctcttcaggaaggctggatcaggggagccggcttagatgtatacgaaaaagagcctgtcacccaagataatccgctcctgcagctggataatgtcacgctgcttcctcatatcggttcagcaacagctaaagtgcgcttcaacatgtgcaaacaggccgccgaaaatatgctcgcagcgatccaagggcaaacaccgaaaaatcttacaagagaatttcaataaatcaaaaatccggtctgataacagaccggatttcatattacatacgctgaagaacagcacgcttataaatatgacgggtgacgatataataaagagcctggaatacaaaataaatgaagatgacaattacggcctcaagaaataaattggaattcagcatattacttaacgctgcatacgcaaagcccgcgtgaatcgtacctgcgataaatgggatgaagaataaaaatcctatttgctttccaaggatcgagtgaatctctttgtccgtaacccctatcctctttaacgctaacacctgcactctcgtatcttctatttccgtaaacatccgcaaatacagcatgcttccttgcacgataaaaaacagcacgctgacaaacagaccaataaacagcattaatgcaactccctgcttcacaatttgataactaggagcacgtgtttgaaaatcagatgtatgttctttcggcaccatgttttcaagcttttcagagacatccaccgtctcctgccaatgctcaagctcataacctaccattctcatctgttccttcagcggcacatcctgtgacagactgtcaaagctcttttcgctgacaaccaataaacggctgactccatcgacagacatcaatatccctttgttttgctgctttttcatgacataggaaagggtttttcctgacttcatatgaaatgctgctgtttccccttctccaaatgtgtctttcaccatcatttgaaaagaaacattaataaatgcttcattttcttgtaaatgaataactgggaaccctttttcctttgcgacttgattatagactttttctgaaatcagcaaagcttcagcttccatcttcttatttccatacggcaagtctgactgaaaagtgacaggaatccctgtggcatccaccttatacttgataacagcatgagcttttttcaatgtattctcagctgtctcaggcttcatgacctgaaagcgggaagcatccttttccacccaggaaacagactgaggaatgctttgctcctcctgcctttgtaaatcggaataaaacatatagatgacacctgtagctgttagtatgaccgctgtaatgacagaggttaaaaacagcatgcgtgcatgatccttcagcctgaatatcatgttggaacgcacaatgatattcgtgcctttgtagaagctgtgtttctttcggtacagcatgcggaaaaacgccacactgctttgtgtaaaaaagaaatacgtgccaactaacactaaaatcaaaattggaaatacccgaaacatcatgtcaatggcattggctgttgcagatagataataaccgctgccaagacatagcaaagacaatacagtgagccatttcgaataaaccggcaaacttttcggctttttggccgatttaatcagttcaatgatttccagcttccgaatccgtcccagtgataaaatgagcagcgtctgaaacaggatgagaaagccggcaattgtcatcacaaacgctttcggcacaatggcaaacgaaatcggcaccttcacgctgagcatccatgtcataatcataaaaaacagttttgaaaataacaggcctgctccaatgccggccgcaatcgccgcaagagaaataagtgactgctcataataaatcatcttgcgaagctgctgctttgatgtgccaaacagtgtcagcagcccaaactctttctttcttgcctgcaaaaacgctgaattggaatatgtgatgaaaaatatacaaaacacaatgatgacgacaagagctgcgctcaagcatgttttgacaaggcttccgccatatatattgtcttcattgacatcaggatgaaaaataaatgatgtgaagacaaaaaacaccgaaacggcaaacacacagcttaaaaagtaggccacataccgttgcagattcccaagaatgtttttacgggcgatagttctcaaattcatgaaaatcgcctcccaacacactcaaggtatccaatatactttgataaaacacctgcctgtttgttcctctgtgaatctctgaaaagaaacgtccgtctttaataaaaacaattcgtttacagaaacttgctgctgtggcatcatgcgtaaccaacagaatcgtcgcttccttttcctcattcagctgagccagtgtgttcatcacttgctttgccgattttgagtcgaggtttcctgtcggttcatcggcaaggatgagcgccggattgtgaataatcgctctggcacaggctgcccgctgctgctgtccgcccgaaacctcatatgtgcgatgatcgagaatgtgcttgatttgcagcgtatccgccagttcatccaatcgggcttccatttctctcagctttaccttatccaatgcgagcggcaagagaatattttcacgaatcgtcagcgtatcaagcagattaaaatcctgaaagacgaagccgagttctcttctgcgaaacaaagccagctcttggtcctttaacgttttcggctgaatgccgttgatcatcatctcgccctgggtcggcttatcaatggtagccagcaaattcaaaagcgtggtttttccgcttcccgacggccccataatcccgacaaattccccttttgacacactgagatcaaaggcgctgagcgcttggtatgatattgttcctttatttgaatagtacgttttcgataggttcgttgtttgcaacacgttcatgttctgctcctcctttttctttattataaaaaggaagtcagcatcctcccatcgaactttcttgcaattccgctccccaaccttacaatgctgtcacattcacgagggtgtcacttgaaaacacgatggtcatcacagtgccagccccttcttttgattccgcatacagcttatggccgagacggctgcacacctgttttgctaaataaaggcccattccagttgcctctttcatggttcgtccgttttctccggtaaaaaacgcgtcaaaaatccgcggcagatcctgtggcggtatgccgattccttcgtcggcaaccgacaatcgcgtctcatgtccctgtgtttcaatccggattgtaatagggtctcccacaccttgctttgaatattttaaggcgttgaaaaggatttgctcgacaacaaaggaaagccacttttgatcactggaaatctgaacggcatttggcggcacatgtaatgttggaaaaaggcgccgtttaataaactgacgtttttcctgattgatcagtgaacgaaccatttctgccaaatcaaaggtttgcggctttacatcaaatgcaaattcctccagccgagccgtttgcagcatcatatcaagaccgtaacgaaatctctcattctcatcctccagctcctctaagaacgtcggaaaagaggatgaggttccgttttttccttcctgaatcattaaggatatgacggataccggtgttttcatatggtggacccattggttggtgaaggtgtaatgctgtttttgctgattgatatattgtgagagcctgctttcgtattgctgcccgagtgcgttgatcatcttcgtccaaagcacttgctctcctgttcttggctttctggctttcaaagactgtccgatgtcattcgaagaagaggcttgttctgcaagctttttaacatatgtgagaaaggaaatttgccgaacataatcaacagcaaaacctgcggctaaaagagtaccgggcaaaatccatatgtacatcatattttctttggaaggttctgcgccgctctctacaatgcttaaatacgcaatcagcatggcggaccctatccctaataatgaaaatagaataatggctaagcggtcgatgagataagtctttaacactccgcttcatccttccgattgacttgaaattgatagccttgtcctctgattgtggaaatgcaatctgtcagtcctgcattctccagttttctccgcagccggttgacattgaccgttaacgtattgtcatcgacaaaatcaacgtcatcccataacgcctccaatagttcatcacgagagacaatttttttatgctccctcacaaaaatagagagaagctgaaattctttttgggaaaacagaatacggacgctgttccattcggcctcattttgatcaggataaatcgtcagcccgccaagctccactattctagattcctgcggcaaagagggcgagtattcaccatatgtgcggcgcaggacgcttttgattttggccatcactacctctaaatggaacggttttgtgatataatcatcgccgccattttcaatcgccattacctgattcagctcatcggtccgtgccgatataaagataatcggcgcattggaaatggtacggatttgcctgcaccaataaaacccgtcaaaaaaaggcaggttgatatcaagcagcacaagatcaggcttcatttctgcaaattccaattttatatcattcagctgttcagcaattttcacttcatatccgtatttttgaagatgaccgcccagcaaagaagcaatccgctcatcatcttccacaagcaaaatccgatacacgttgatcccccttatatgtacatcacgatgatttttctagaagattccaaaattattatagcatgtgcggaatagtaaatcggtctttttctttttgttatgatagaatgataaaggtaaaattttcataataggcaggtgtcgtgatgaagaaaatcatgctgtttctggcaatgacgtcaattctttcagcatgtcagcccaactataccgggaaatacatagaaattggggatacactaactgactataccaaagagtgttttaaagagaatgaaattccttataaatacgaaaagggaaaactgtatatcccagaagatgcatttgatacagcgatctacacttgttcataagaaaaagcttgcagataacctgcaagcttttcacgttacaaaaaatgagtatttaatttctcttcaaatcctgaagggccgatgtcgcttttttgaatgtcaccgccgttttcatgaatcgtaaaatggcgctctgacatgaccatccttccgctcggcgtcagctttgaggcaagcagggatttgttaaaaggagatttttcatgagagtgaatgatgtccttcatgttatctaaatcaccgagatcactctcttcaagagtaaaggcgtacccgatttgccagccttctcccttgtccatcagcagaacatggctgcccttttctgtctcttctcttttgattcggaatgacccgactggtgactgtaccgtttctccggaaagcggtatcggctggagcgccaggttgatgccgaaaccgatatcaacgaggtaatcgccgttttccgcagacagccatacagcagcatgcgtcccttctagtgcccatccctcttgattgcctgcataaaccgttcctcgaatgagcttcacgtgaaacccggcctcacgcaagacaaaataaaggaaaccatttagatcgtagcataggccgccgtgctgatctttgagcagacgtcgccatagctcttcttttgtgatcttataattctcttttgcaagtacggcacggttttcgaatggaaaacggtatgccattgctttgagaaaaaggggaagatcgccgaagctgacatgatctttctcccagccaattttctgaaagcagtcttttagaaagtcactcatttttatcacctaaacttcttcttgaacgtaagcagccagcttctccagcgcctcttgttcatcttctccctgggcaatcaaggtaacctcagtgcctgtgcttaccgcaaggctcatcagccccatgatgcttttggcgtttacttttttcccatccttctcaagaaacacatctgacgtaaaccggtttgcttcttgtacaaacaaagcagcaggacgtgcttgcagtcctgtctttaatcgaacttccactttctgttgaaccataagatctccccttttctttacggttattttaaagtgacggtttgccctgtccgcagctgttctgcgatttcgtcaagttttctcagcctgtgattgatccctgatttgctgattttcccgcttgctaccatttcccccagctctttcagcgtcacttcctgataatcaatccgaagctgcgcaatttcccgaagtttttcaggcagcgcctccaggccgattctttcatcgatgtatttaatattttccacctgtctcagcgatgcgccgatcgttttgtttaagttggctgtttcacaattgacgaggcggttgaccgaatttctcatgtcccgaacgattctgacatcctcaaatcgcagaagcgaattgtgagcaccgattacgtttagaaactctgtaatcttttcagcctcttttaaataggtaatgtagccttttttccgttcaagcgttttgctgtttaactgaaactcatttaacaggtcacataatgaatcgttatgctccttataaagagagaagatttctaaatgatacgaggaggtttccgggttattgaccgaacctcctgccaaaaatgctcctctcatataagaacgcttgcagcatctctttttgaccagctctttcgaaatacttcgttcaaacacaaaattctccccgagtatttttaaatcctctaagatcgcttttgcattttctgaaaaacgcacaatatagacgttattctttttcagccgcattttctttctgaccagcagctcgaccgacacatcatattgttttttcagcaatgtatagatgcggcgggcaatcgccgcgttttcggtttgaacatcgagtacgagatggcggtttgtaaatgataaagctccattcatccgaatgagtgcagacagctcggcattaatgcagcagtccttcacttccagattcgttaattctttttttgtttctgatgcaaatgacatatagccacctcatttcaaggcttcattctttcagtaaatcaacaagaagagaggccactttatgtgtatcgtgacgtattacgtcatttttatacgttacaatttgatctctgatgacttcaagccccatcgctttcagctcttcgatatcaaaatcaacaggacgcgccgattccatttcgtacttacgttttatttcgtcgggaatgtcttcactgttcactaatatcgtatcaataaaaccgcagcccatatgctgattgagcgctttcacatgatcagcagcggtgtaatggagcgtttcgccgggctgagtcatcacgttgcaaatgtatacttttttcgccggcgcctttatcacttcttccccgatttttgggacgagcaaattgggaagaatgctggtatagaggcttcccgggccgataataatcaaatccgcttccctgattacgtctattgtttccggcagcggatcaatctgttcaggcgtgagaaaaacacgcttaatgcgctgtccgtattctgggatcgttgactcgcctgagaccacgcggccatcttccatctcagcatgcaaaacgacactggcattggcagccggcaaaacctttcctctgacattcagcaccttgctcatttctgtgacagcgtgaaaaaaatcaccggttatatttgtcatcgctgccaaaatcaaattcccgagagaatggcctgttaagtcattccctttattgaagcggtgctgaaaaagatcttcaacaagcggctccacatcggataaagcggcaagcacatttctgatgtctccgggaggcggaattttcagttcattccgcagacggccagagcttccgccatcatcggcaactgttacaatggccgtgatgtcaacaggtttatgctttaggccccgaagcaatacagaaagacctgtaccgccgccaaagattgcaattttcggcttttgtcccatcttatttccggcttctcttttcaatgtcccggtgagtaacatgagtatagtaatcctttttgaaataatcagctaaattctcggctaatgtcacagagcggtgctggccccctgtgcagccgatcgcaatgacaacctggctttttccttctcttttataagatggaagcataaagctcagcagatcaattaatttctcattgaacttttgtgtttcattccacttcatgacgtaagaggaaacttctttatccttgccagtcagcggccgcatgctttcgatatagtacggattcggcaaaaatctgacatcaaagacgagatctgcatcaattggaataccgtatttaaaaccaaatgacatgacatttacggtaaatgtctctccttggtttgtcgcaaagtgcttcacgattttttcacgcaaatcacgcggcttcatgtcagacgtatcgtaaatgatttgagagcggccttttaattcctcaagcagctctcgttccagcgcaatgccttcaagcggcaggccagtcgctgccagcggatgcgagcgtctcgtttctttatatctcgtgacgagaatggaatccttcgcgtccaggaataaaattcgcggtgtgatccacggattttcggccatttcatccagcgcttcaatcagccggtcaaaaaattcgcggccgcgcagatccatcacgagcgcaactttgctcattttcgaatttgattccttcatcagctctaaaaacttcggaagcaatgaaggcggaagattatcgacgcagaaatagcccagatcttcaaagctttggatcgcgacagttttccccgctcccgacattccagttataatgacaagctgaatatcatgtgattcactaacactcatctttctcccccctgacttgtctttctatttgatgtgctgcgggtctaaacgataactgagtagctcaaattccggtgtatacgtaaatgtgccgtgcagcagcccttgtcccttcatcataaaatcaaggatatggccgtctccaggggccataggcaggttctgaatgtcattgacatcgtgccactgcagtttgccctcctctgattcagacacattttgtcctgtataagaatcagcgacaaacgtaaacatcatccactcggagacaatgtggtcaccgtctttaataataaaggtaaaaacgccttttaattgaggatttatgatatagataccagtctcttctctgtactctctgatgacggagtctctgactgattctccgctctccatcttgccgcccggcgcgacccaccagccgcgtctcggcttttgaagcagaagaactttgtcatccgtctgaagcacacaatttgtcactctttgcaagtacgtcacctaaccttcgtcctgtcatcgtctatttattataccgcttcaagatgcctcccacaatgaagagacattgacaatcttttcttctattttacagcatattcattccttaattcagatgattttgctgtaactggaattctcttttatttatggacaaaaaaaggacacggataactggagaatccgtgccaaaaaagtgtattcattataaaaagggggtcaattactttattaatcataaccgaaaagcattacacatgtgttacagcggaattaaaacccagtaacgtaatgtgaaactcgtatgacagccctttttattttaaggttttcagcgtttcttggagctcttcgacataatgctgtacgctttgtgccgcaatgcttccgtctcctgtagccgttacgatttggcgcagtgatttttcgcggatgtctccggcagcgaaaatcccttcaaccttagtttccatgcggtcgtttgtttcgatatagccttcttcattcgtaatgcccaggttttcaaacggtttagacagaggaagcatgccgatgtaaatgaatacgccgtctgttttgaattcactttcttcaccggttaccgtatcgacaagcgttacgttaccgactttgccgttttcctcatgaatttccttcacagttttgttccataggaagtcaactttttcattatcaaatgctctcgcttgaagaatactttgagcacggagtttatcacgtctgtgaacaatcgttacttttgaagcgaaacgagtcagatatacgccttcttcaaccgcggaatctccgccgccaacaacgacaagttctttgcctttaaagaaagcgccgtcacatactgcacaataagatacaccgcgtccgcccaattctttttcgccaggcacgccgatttttttatattccgcacctgcagcaatgatgacagcacgggctttatattcctttgaaccagctttgactactttgtactctttgccgtcaatgacctctttaatatcgccataagcgtattcagcgccgaattttttcgcgtgttcaaacattttgttagaaagctcaggcccaaggatactttcgaatccaggatagttttctacatcttccgtattggccatttgtccgccaggaattcctctttcaatcattaatgtcgataaattcgctcttgatgtgtatacagcggccgtcatcccagcagggcccgcgccgattataatcacgtcataaattttttcttctgacacactattcactccttaaaccatcttttcaagtttgggctctttcttataagataagaatccccatcaaacgtattccttacccatatcctataaaatctcatggtgatacgctatttttttgctcaacacgattaaatgtattcgaaaagggtatatgttaataaagaaagagccttctgttttagaaggcccttgtcatatttattattgaacaacacgtcttacaacgcctttaaatgcttttttccagtaaggattgctcatagagtcaacagatacgccatgagatgtattgtcgtttaggaaagtaccgtttcctaagtagattcctacgtgtccatttgttttgtaagtgtcaaagaacacaaggtctccgcgtttcatttcagacgcgctgacagcttgtcctctgccaactaacgtatcagtagttgttccgcctacaggtccaaggttaacacctgcagaagcgtatgcccagcgtacgaatgatgagcagtcaaaaatacggttgttgatatcagattggctgcgtccgccgccaaacttgtacggagattgtcctacaatgcttgaaccaacgctgatcgcgccttcaattccgccagagttgctgataacagtgccgcctgaattgctgtttgagccgctgctcttcttagaagatgagccgtttgacgaactgtttgatgaaccgttagaagaattgtctgaagaatcatcagatgagcttgcttttgctgattcagttgtcgccgtttgactgtcatctgtttgtgtttcgtcagatgctttttgtgcttcttcctgctttttgatcaaagcagccgctgcttcttgttcttttttgatgcgtgcttgttcagcttcagtatttgctttttgatttgcaagttcagacgcctctgattttaattcagaaatcgctttagccgttttcttctggcttgcttttgcttcgtcgaaaagcttgtctttttcattaagctgtttatcaaggtctttttgcattgtttctaatttagccaatgcagcttgaacttctttcagcttgtcattcaaatccgcttcagaatcctcgagcttcgctttatcctgctcttgctgtttgattaaatctttgtctgcgtccacaatagatgaaaccgcagtcgcacgagagataaagtcaccaaagcttgttgatcctaaaagaacatctatgtatccttgagatccgccgctttcctgtaaagaacgaacgcgttttttcaggatttcattgcgtttttcgatgcgtgcttcagtttctttaatctcttttttcagttttttgatttcttcttttgttttatcattttcttcttttttatcttcgatcttgttacttgtatcaagcgccttagcgttaatgtctttcagttctttttcaatctttgattgattttcctgaagttcagttaattctttttccttcgcttcaatgctggaagcaacctcagattgcttgctttcgattttttgtttcttttcatctaatgtttccgccgatgcagttttacttgtaaatgggatcaaaaaactgcttgtcccgatgacggaagccaaaccaagtgtcaataaactctttctcactttttatatcctcccttttactgtgaacctgtcctcatttggaatcgtattttgaacatcaagtttcgttcctcatactctacgaggaatgatggttgtttatggttaattattctgtgcatctcttattctggttgtatagcgtttatttcacatcatatgtaaaaaacactaattccttatgtacgagaatcattataccatcaagtttcgacaaattagcgataaattttattacatttatgtttcaaacagatgtcaagtcacacatcatttgtcatttttcttaagcgtgcaaaaaaactgtcgatattattttttaaatataatctatcaaacaaaaaagagtcgattaaataaatcgactctttaaaatttactattctagaatatcatcaatatatttcatatatttcgtcaacgttgccggagagatgccgaatcgggccgctgtgtcttttttcgtgtcttgcttgccatgggcttctttccaaatataacagatggctgctgcccagcctttctcattcttcaacggagcagctgcacgaatttgctggatgacatggaaaacccagcagctcatgacttctgttttcatctcttctttttcagcttgctctaatagtttgaccgtttgataggcgaaaagtgcatcctctgaaacgtcagcagccgcggaatctccattcagaagcagctttacaaaatgattttcaaaaggagcggtgattctctttgagcgtatcaccgcttcaagatgctccgtttctccctttgtgctgctgatataataggctgcgagacgctgttccacagatgaaggaagagcttccctccgctcaatccaaggcgccgggcggtcttcgccgggatattgcgactcgacttttctccagatcgtctcggcaaagtcggtatgtcccgtaaaataagcagagcaggaaagccagtaaaagaaggtgtcgtcaccttcaaagccggttttatataatgatttgagccatttatatccgatctcgtagcggccgacaagcgccaaagtagcacccaatttataacgctgctccattagcatcggatagacattggagagctgatcactcaattccaccactttttcgtcttctctttcataatagtagaaaacgagaagattgcataaggcgtgaagatttccttcattatgagaaagcacttcataagcggtttgcttcgcttttacaacgtttcctgaatagaaataggcaagcgcgagattgttgtatgctgaccaaagctccggatattcagctgtgatttcctcaagcgccgcaaccgcttcagcaagctggccgctttccagcaatgactttgcccgatcctgtttcaccagcagttcatcctgatcatacaacgaatcctcaatgccgtcgtctcctaaatcgagcaaatcaagcagactatcgttttcttcggcgaattcaccatccgggtccgcatcagaataagcggccgcttccttataagcttcctggaagagccccagatgggcaaagttattcgctttaaagtaatggcactccggcatttcggcctccagatttgccatgatatagtcaagaagatcgttcgactcttgatattggcccatttccgaataaatgaccgcaagctgtgaaagcatctctgaatcctccggctccaaatgaaccgcgcgctgaatcagtttgcttgcccgttttagattgcgctctttatacgctttcaagcctttatgaaaaaaatattgtccatcttgaagcagctggacaatttgtgcgtgatttttatgttcagaagtgtgttttcccacaactaccctccgttttatacaatattaccgtcagtagtataccataaatcgtaagcccctcaatagttcaaaaggaaggattgggaaaatccctcctcttttttattggctgattcgaccagaatttacccggctttgttttctaagtccgcattcattttcagctgctgttcagcaaaatccctataaagaccatgggaagccattaactcatggtgtgttccacgaccggtaatttcccctttttcaacaaacaaaagctggtccgcatctacaacggtagataggcggtgagcgatcacaatcgttgtgcggccctccatcagcacctcaagcgcctgctgaactgatttttcagattggctgtcgagacttgaggtcgcttcatcgagcataagaatgcttgggttacggagaagcgctctcgcaattgcgattctctgcctttgtccgcctgacagcataatgccgcgttcgcctacttctgtatcaaactgattcggcagctcctttataaaattgagcgcatatgccatctccgcggctttttcgatctcagcatccgtcacatctcgttctaacccgtagcaaatattttctctgattgacccggacattaacgggctttcctgcgatacatacccgatatgctccctccacgattcaagcgagtaagtatcgaccggctcgtcccccagtcgaatggtccctgcagtcggagtataaaaacgttcaagcagcttaaacagcgtcgttttccccccgccgctcggaccgacaatagctgtgactttacctgcttcaatgacggcgctgatttcttttaaaatcagctgatcaggcttgtatccaaaagacacgcgatcaagctgaatagggagatgcgcattttcaatttgttttcctgtcactgtatcttcttcttcctctgctaaaatctcaatcattcgttctgttgcaccgattgatttttgcagctgtgtgaaaaacgttgtaatctggcccatcggcattataatttgaaacaaatataaaataaaagccacgagcgctcccgccgtgagttcgcctgaagatacctgcatgccgccatatccgatcactgcgacaagcgctgccattagcacgagtgagataagcggaccgacaagtgattgaaccttagcttctcgaacgccaagcttaaataatgatgaaatccctgttttcccgcggccgtattcgacatcctccgcatttgaagctttgacaagtctgatttccgggagaatttgattcagcaggcctgtaaaacgggctgtttcatcttgtgtttcccgtgaaatggagaacattttccgtccaatcggcaccaaaataagagcggccagcggaacgaccactaacacaagcagtgtcagcttccagttcataataaacaagattgtcaatgatccaatgacagaaatgatgcctgtaataaatccgctgatatgggttgtaatcaattctttgaccaccatcgtatcgttcgttacacggctgactgtttctccggaagcatttgtatcgaaataagagacaggcagcttaattaatttcttccataataactcccgcagcccggaaatgattttttgtccattatagttaagcgcataggtggcataagcgcttaaacccgcctgaacgaaaaacaccagcgcgatcaaaccgatttgcgtgcctgacagatttgacatagaaaaaccatcgacaagctgcttcgttaataatggaatgagcaggctgaccagcgtggttactacactgagggcaagcgcaaaggcgagctttccataagaaggattggtccgtcttactaaggcaaaaaagggtttcaatttacttttagatttttgtttcttggttggcatatattttcctcctgtttcagcgttcagaaaggtgaaaagtcatagcaaaaggatgatttttactctttctcaatcatatcaatggagaaagactttttcagtatatttttgccgtgatcaaaataaaaatctcccactcattgtttgaataggagatttttgtgttagacatctttcactggcttcttttttctgtaagtcaatgttacatcctgctgtcgcaggtcttctattatcattttgtaccgatcaacttttgcggtatgttcttcttttatcatctgaagggcagcttttcgtttttcgctattagactcaagctctttttttattttttttacaatcaaccctttttgccctttgatttcctcttttaatgaagactcaaatttctttgtcaggctgagaaagtcgttgatcggttgattgagggtgcccgctttccccttcatttcatcttgggtaagaaacatataggtcgttgatacaatttctgtttcactttctgaaaataaggaagtcactcttcatattcctcctaagactgaaaatcaaataactgagaaatcatttcttctttttcaaacagcttttcaatactctcgcggatatttttgataaaatctcttttttctgttgtctgtttttttaattcagcaacaattccatcattagcaggaagcgcacctgtgtggaatgattcatgaactgagattttctccaatttatcgaatgtgtggctgaaaccagctgcaagccggaattgaagatcgaaggcataatgcgaagggttttcttccatatgatgaatagccgtgatgatcgcctgctttttgtctatgaagtcttcatcgatttcctgactgtaaaccttctggtacttagaaatcgcatcttccatatcttcaacgattttcataccgttttgatagattctgacagcggatgagagattgacttgaatcgtttctcccgagccactcttccctgtaaaataaatatcggagcctttatagctgaagcctttttcctttgacaaggcgttgagcatttgaacgatgctgtggccgtcgacgataagttttagtgcgtcttttgtttctgtgtcgagtgttttcaatgaggacagaattgattttacatagtccactatttcaccaacgtcttttaaagcttgcataaattggccatattttagatggtctatgaaatgttcgtaccgtgactctatgcctcgcatactcgcattaatattcgttaattcttttttgatgactttcttttgcgtttcatcaatataaccattttcagctaactgatctacgaccggtccgctgtttctcaacaaggtatgaagaaaacctaaaaacgacggcagttcctcttttattcggccatacatttgcttaacatcatcaaaatgctcatataggacacttactttctttaaagcgccgtctgtgtttttcactttttcaatcaggtctatgtctatcccgctggctgcctttataaaaccgttcaagccgtctttttcatagtcatccttatatttttgaaggaatttttgaattgacctcacatcttcgtcaggaaccccatccataatgtttcggatgccttttacacttgtatttgtatctgccatcttcacatcaccgaatgtaataaaatcggccttgccgctgactccatacagcgggtcatcttttgagatgcgctgagtgatgtttgttgttacgcctttgtcttcataatatttttggatttctttttttaacttttctggcgggatggaatctatatcttcatatttataactaaatttcctaataacatatctatataaactttcatcagtttcaagtaattgatcaatattgacttgagctccatttaccccataaacttcatcatattctccatcaatcaattgcaccataacttggttattatttgcaagtgaatgtcctaaggcgaatgtttttaaatcctcagagttacctgctgctttctttgctttgttagtaaactcctttgtagcctcatactgactatgatcaattcctaaaaaaagaccaaaaaagttatatgaccaatccttattatcggcactaccttctgaaataatctgaagctgatcaatatgttttttctcatctattatatggattgccgttccatcgtaacctgattctctggtcgaactttgtatacttgtattctgatttacaagttcattggaggtgtaaatttcaattttcatattctcaggaagatcgtggtgggtttcctctttataaattctgcgtatatctgcttcgaaatccttcttagctttcttaacttcactcgcaatagttgaggcaaacttttgtttatagtcatattctaaatcaattaaccttaactttacgttctcattctcaaatacatttttatttcccatcttatttctcctttttatctattaaaaaggtgatagaattaattaatttctcaactttatttttagccttttcttcatctaaggagcatggttgattttcatttttgcatccaagggtaaaggcgtattctactcctaggttatcttcctctgtagacttaacatatccaaaataactgtatgaataattatattttctatcaatatcgtcaaagatgtcttttttcttggcagtgtaaatatccgttttctttttgctgctttttttgtattcgcctttataatcattttttccactaacaatatctagcattgtcttaggttcattcgcaaaactttcttctttgtaatatgttacatggccatcaaacattacattggtgtctttatcataactattaaatccaatactttctttgtttttcccggttaacgatgatcttcttgatagatactttccatcctccggaaacaacatcctaaaccctttcagcttagattccagcaaataatatcctggttcctcttcttttgttgacaccatgtactctctcgttttctcgtcctgaaacgcaggtacttgaggcagatccttgggatccatgtcttttggttttaccgcttctgttttattgtcatttgtgctgtttttatcattgtcattcatactgcatcctcctgtcagggcaagtaataagctgaagcaaataaagatgatctttttcattacgaacctccacgggttttgtgagaatagtattctatttttatatcaaaaataattctattgacctggttaagagatgattatttcatcctttttcatgttacatcatggcggaatttggataaataggaaatgagactcggttttgatctccttttattaactaatcatatataacacccaatataaatctaaatacctattacttttttcacaaaacaaaaagagccgtatcatccggctctttactcttcaatctcagaatggcgttttttcaatacgtcaagcacatcatccagcggcagggattgttctctgagcaggacaagcaggtgatacagcaggtctgccgcttcccatttgagttcctcatgatcccggtttttcgcggcgatgatgacttcggatgcttcttctccgacttttttcaaaatcttatcgacgccttcacggaagaggtacgtggtgtaagctccttcaggcatttccgcttggcgttccgcgatcacccgctccagttcgttcatgatgccgaatcggtccgcggcctgttcttctgtttgttcctttgtaaaacagctgtagctgccagtgtggcatgccgggcctgacggttctacgagtacgagcagcgcgtcttgatcgcagtcataccggatacctttgacggcttgcgtgttccctgaggtttctcctttatgccataacgcttggcgtgagcggctgtaaaaccatgtttccttcgtttccagcgttttttcgtacgattccttgttcatatacgcaagtgtcagcacttctttgcttgccgcatcctgcacgatagcaggaattaatccgtcctcgttaaaacgcagttcatctgcctgtttcatctcacattcaccccgtactctttcaagtatgatttcacttctttaatcgatgtttctttataatgaaaaattgaggcggccagcgcggcgtcggcttctccttttgtaaaagcctcaagcatatgctgtgcgtttcccgcgcctcccgaagcgataacagggacggggacagcttcggaaacaagctttgtcagcgtgtggtcgaaaccttttttctcaccgtcggagtccatgcttgtcagcaatatttctcctgccccgcgtttgacgccttcttttgcccacgcggtgacctcccaatctgttttctttctgccgccgtgcgtatagaccttatatgtgtcagattctttgtcatacttggcatcaatggcaagaacgatgcattgcgaaccgaaaaactcggctccttctgcaatcagctcagggcggagaacagctgccgtgttcaccgacactttgtccgctccggcacgcagtatcgttttcatatcactgagctgattgatgccgccgccgactgtaaacggaatggcaagcttcgcggcaacctgctccacaacgtcaaccatcgttttgcgtccttcatgcgaggcagaaatatcaagaaaaacgagttcatccgcgccttcccggtcgtacacttccgccagttcaactgggtcaccggcatccttcaattcgagaaattgaattcctttgacaacgcgtccttctttgacatcaaggcatggaataatccgttttgtgatcatttgcgcttcaccctttcaagcgcctcacacagcgtaaactgattggtatacagcgcttttccgatgatcgctccagagacgccgtccgcctcagagcgggcgagagcttcgagatccgcgacggagctgactccgccggaagcgatcaccgatttccccgtttccttagcaagctcgaccgtgcttttaacattggggcctgacagcattccgtctgtcgcgatgtcagtaaaaataaagacttccgcaccttcattggctagctctttgcccagttcagttgccttaagggttgatgtttccagccatccctctgttgaaacaaaaccgtttctcgcatccagtccgattgcaattttctcgccatattgtttcagcatttttttgacaaacggagggttagaaactgctgagcttcccaggatcacccgatcgactcctgctgataaatattcatagacgtcattttcggaacggatcccgccaccgatttcgactttcaggttcagcttttgcgtaatctcaatcacatggcggtcattcactcttttcccttctttggccccgtcgagatcaacgagatggatccattcggcaccctctttcgcaaataactcagccatgtcgtacggtgaatcgccatatatcgtttccttattataatccccttgaacaaggcggacacatttgccgtttctcatatcaattgccggatataatgtaaaagcactcattttttcaccttctgttctgctgccattttcgtaaattgagttaaaatagacattccgaccgtgctgcttttttccggatgaaattgggcgccgaagacgtttctttttccgactacagcaggcactcgtacaccataatcggcgcttgccagaagcgcgttctcctccatcccgtcaatgtaataggaatgaacgaagtaagcgtagccttgttctgtttcagacagcagcggagattcgttatgaaaggaaaggaggttccagcccatatgcggaaccttcagcttgtttcctttttcatcttctgctttcagcctgactgcttttccttttaacagcccgagtcctgaagcggtgccgttttcttcgctttcttcaaataaaagctgcatgccgaggcagatcccgagaagcagccttccctctgagaccatatcgtgaatcaattgatcaagcttcgtgtagcgcaaattgtccatcgcgtctccaaatgaaccaactcccggcaaaatgaaggcatcagcttctttcagctcctccggcttttcagaaacaaaatacggcacgccgacacgttcaagcgcctttgagacactgtataaattccccattccgtaatctatcacgccgatcatttacagcatccctttcgttgacggtattcctttaactcgcggatcgatcgttgtcgcttcatcaagcgcacgtcccagtgctttaaaaacggcttcaatcatgtggtgggtgtttgtgccataatgaacgatgacgtgcaggttcattcgagcttcgagcgccagcttccacaaaaattcatgtacaagctccgtatcgaaagttccgactttagcagccgggaaatcagcgcgcatttctaagtgcggccggttgcttaaatcaatcacaacttgagcaagtgcctcatccatcggcacaaacgccgatccgtagcgtttgattccttttttatcgcccaacgctttgagcagcgcctgccctaagcagatgccgatatcttcagtcgtgtggtgatcatctatatcaacatcgccttttgcgttaatggaaagatcgaattggccgtgtttcgtgaataaatccaacatatgtgtcataaacggcacatctgttttgatatccgcttgtcccccgccgtctattgtaaatgccagttcaatatctgtttcgtttgttttcctgacgcgttccgcttttctcatttagaaatcctccgttctctcgcttcaattgatctggcatgggcttctaacccttccagtctggcaaaagccgcgatgctttcggcatgttcttcaaaggctgattgactgtaagaaataatgctcgatttcttttgaaaatcagttacgtttaatggacttgaaaatctggctgttccgtttgtcggaagcacatggttcggtccggcaaaataatcaccgacaggctcagggctgtatctgcctaagaaaattgcacccgcatgtttgatactgccaagcaaagcttccggagactgtgttatgatttctaaatgctctggcgcgagtgtattgacagtattaatcgcttccaccattgtttccgccacatatatacaaccgtaatctctcactgaagcttccgctatttctcttcgcggcaaggttttcagctgcttactcacctcggctgaaaccgcctcggccagcgccatggaatctgtgacaaacacacatgagctgagcttatcgtgttccgcctgtgacagcagatcggctgcaatttcgctcggaatcgctgtttcatcagccagcacgacgatttcactaggtccggcaatcatatcgatatcgacatcgccgaacacttctcgtttggcaagcgcgacataaatgttgcccggacccgtgattttatccaccggttcaatggtttctgttccgtatgctaacgccgcaatcgcctgagcgccgcccattttgtaaatatcttttatgcccagctcggctgcagcaaccaaaactccaggagacagcagaccgtctttttccggaggcgtgacgagaacgattctttcaacgcccgctacgagcgccggaatcacattcatcaaaacagatgaagggtatgcggccgttccccccggcacatatacaccggcggaatccagcgccgtcactttctgccccagcattgtgccgtcctttctgtgataaaaccaggaggattgcagctgtctttcgtgatattccctaatattttcgattgcctgcctaatcacctgaagaagacgtgaatccagtgaggtgtatgcctcctcaaattcttcttttgtgaccagcggactgtctatttcgatgccgtcaaatttcgccgtgtagctgcgaaccgcctgatcaccgtttgctttaacatcttctataatggaccggaccgtctttctttgctcttccgttccggcatcgatggaacgcttgagagaaagccgttccgctccgctgatggttttgatcttcattttgccgtctctccttccacaacgagagataggcgggatgccatttcgtcaatcacatcgtctttcatgcgatagcttaccgggttgacaataaagcgagaggtaatgtcacaaatgtgctccgtttcaacaagcccattttctttcagcgtctgtcctgtggaaacaatgtccactatccgatctgcaagcccaatgagcggagccagttcaattgaaccgttgagcttaataatctcgacttgttctccctgctctctgaaataactggaagccacattcggatactttgtcgcgattcttggcgctactccgctccagtctgtattcggaagtccggcgacagctaagtggcatttgctgatttttaaatccagtacctcatacacgtcgcgttcctcctccagcatgacatccttgcccgcaattccgacgtctgccacgccatgctccacatacgtagttacgtccatcggcttcgctaatatgaaacgaagattttcctccggcacatcgatgatcagttttctcgaatcttcaaactcctcagggagcctgtagcctgcctgcctcagcagccctgccgcttcttcaaatatccggccctttggcatcgccattgtgagtaacttacccattttgctcttcctttctggcaccgataaaataagtgacgtttgcaaaagattttgtcatctggtcgatattttctattcccgataaatcttgaagaaccactttgttccctttcatgcgttcttcattcgcataagcgatggcttgcgcccgctgctctttgctgaaaataacagcgtctatatcacaaggttcttctttcatatgaagggcttcaatcagccggtcgatccgaagcccgaagcctgttgccggtgcaggtgaatcaaaatggcccagcagcttgttgtaacggccgccgcttccaatgacaaaaccgacattctcggcgtacacttcaaataaaatccctgtgtaatagctcatgtggctgaccatattcagatccaggcggacattttccgtacatccgtaatcctcaagaatgtcccacagcgccttcagctcatcaaccacgctttttccttgcgcagaatcgacgatttcctcggcacgtccgcatacttctataccgccccgcagttcaaggagctcaagcagcctgcttttatcaatggaggaaagcgggagagacttgacatgctctctgtaaccgacgtagttcttttcatataagaacctccgcagcacatcagctcgttcaacgttcccgagcacctcaacaaacaaagcatccgcaatgccggcatggccaatggcaattttaaaggatgccagcccagcgtttttcaatgccccgacgactaaagcaatgacctccgcatccgcgctcgttgtgccgtcaccgattaactccactccgacctgctcgaactcagccggacgtccgccttcacgctcctgagccctgaatacatttgccgcatagccgactcttagcggatgaccgtgtttcagaagcttcgatgccgccacccttgcaatcggccccgtcatatccgggcgaagcaccaatgtcttgccgtcctgatcaagtagcttaaacagctgctgctcttcaattgctgactggacgccaaccgtatcgtaaaactccagtgtcggcgtttccataaattgatatccccatttatcaatcaaatcggttaacgatcgtctcaccttttttttcgtttcgtataaaccgggcagtgtatctctcatgccgtgcggtttttcaaacataaacatcaacccgagcacctccgctgttatcttatgaaggaaaattccgaatcctttagttcgctaatatgataatatgttagcagatgaaagaatgaaaatcaacgcttaacttcagtaaggatatttttagttcaaatatccttctcctcattatgaaaaaatcatgaataatgtattaaaggtacgtaatatctcaaattctttatgtttggcatgctataatacaaatcaaatagagaacaaggagataaagatgaaaacactgcgaactctatgtgtcctgatgattctttcaggcgttatttttttcggacttaaaatagatgcaaaagatatagatattccttttttgaacagccttaaaaaagtggtttctgatagcgatacagatacaggtgcgaatagcaaaaaggagctgaagggaagcgcaaaaccgctggatgtcatcctttacaatcaaatggacgcaccccggctctataacggctgtgaagtaacaagccttgcgatggtgctgaattacgcaggatacgacgtgacaaaaaacaccctggcaaatcaggttgccacagtgcctttgacatacagcagcggattaaagggtgatccgaatgacggatttgtcggggatatggcgaatggccctggtctcggtgtctaccatcgaccgatctatcagctggcgaaaacctatgcgggagacaaagtgtctgatctgactggaaaaagcatttctgctgtttatgaacagcttgaaaaaggcaatccagtttgggttattacgacagccaactttacgccagttgacaacatgcagacatggaaaacaccaaacggaacgatagagattacgtacagcgaacacagcgtcgccgttacgggatatgatgataaatatgtgtatctcaatgatccgtatggctataaaaacagaaaaaccgatagaacaagctttgaaaaagcgtggaaacaaatgggcagccaggccatagttattcaaaagtaaacgcctgaaagccgcactatgctctatcctgagcaaatacgacaatattcatgctttttgtttcaatcggtaagatcgattcattttccatttatcatccagaattatctttactttcaggctgtctgtttttatgattaaagcagattcagccttgccccgatctatgtgagagaagccggtgcaagtcgctgacgcttctcttgcaaaaaatgaaagatatccggggaggatttatcattgaaaaaattcgtgtctatcctatttatgttcggtttggttatggggttcagccagtttcagtcatcaaccgcttttgcagcagacaaagtggtgcacgaaacaattatcgtaccaaaaaatacaacatatgacgggaaaggacagcggtttgtggcagggaaagaattaggcgacggaagccagtcagaaaaccaagaccctgtttttcgtgtggaggatggtgcaaccctgaaaaatgtggtgcttggcgcccctgccgctgatggagtacacacttatggaaacgttaacattcagaatgtgaaatgggaagatgttggtgaggatgcgttaacggtgaagaaggaaggaaaagtgacgatcgacggcggttctgctcaaaaagcgtcagataagatattccaaatcaataaagccagtacattcacagtgaaaaacttcacggcggacaatggcggaaagttcataagacagcttggcggttcaaccttccacgttgatgtgatcatcgataagtgcaccatcacaaacatgaaggaagcgatattccggacggacagcaaaacaagcacggtcagaatgacaaatacacgctactctaatgtcggtcaaaaatggattggtgttcagcatatttacgaaaacaacaacactcaattttaaccaaaaaagtccgctgatgttattcagcggactttttcaatctttcttgcatttcttccttcgtatagatgatcctcatcggatttccgccgacaaatgcgccggcaggcacgtctttatggacaagtgttccggcggacacaactgcgccatctcctattttcaccccgggcagaatggtcgtgttggcaccaatcatcacttcgtctccgatcagaactgtgccgatccggtattcgtgaatcaaatactcatgggccagaatggtcgtattgtacccgatgattgtatttgttccgactgagatcttttccggaaacatgatatctggcatcaccatgagggcaaaggatgtctgatttccaaccttcatccgcagaaatgtacggtacagccagtttttcatccctataaacggcgtatatctcgcaatttgaatgacaatgaaatttttgacgacctttaaaaaaggtaccgtttgatagacatgccacagtgagttggcccccgagaccggatgacgatctgtttttctcacagattacttcactccaacgatttgtaatagatcactcattttctcaagcataaaatcaggctcatgcttcgccagcatttccggccctttaatcgtccatgcgactcctgccgtttttgtaccggcgtttttgcctgccagcacatcgtggtaattatctccgaccataatggcttcctcgggcttgcttcctaactgtttcagcgctaacagcacaggctcgggatcaggctttgcatttgtcacatcatcaagggtgacaactgtttcaaagaattcgccgattcccgtgagcttgaggcccatattgacagtatctcttaattttgttgtcacaattcctaatgtaaagccggctttttttaatgcatccagggtctcatataccgtttcatattcagtcacgagtgaatcatgcatgtcatgattgtacgctctgtacatagcgatcatatcctcgcatttatcagggtccatcgaagagaacgtttcaaaaagagacggcccgataaatgcaaggacatcttctcgtttatacttgctcggataataatgctccagtgtatgcaaaaaggacgcgataattaattcattcgtattaataagcgttccgtctaaatcaaacagaatcgtcgttacttgtttgtcactcatattgcttcctttccaaccgctgagggtttccattttttccacgtgtgcgcaatagccattgtcagcagaactgctgtggtgacacgaatcaaaagaagcggccagactggtatgccgagcggaataaagacaagtgtatcttccacgaccgcgtggcaggcaacgagaaatataaatgccaatgtcatatcccgcttgctcacgccgtcatcctcgacagctttgatcatgacacccgctccgtaggccagaccaatcgtcagtcccgccaccatcgtcatagacgtatttttattcatgccaagcagctgcgtaaacggcgacagccacctggaaaaccgatgcagccagcctaaatctcttaaaaactggatgataatcatcagcgggatcactattgccgccagctgcaaaacaccaagtccggctttcgttaatgcttctgccaacattcctagccagctgtctggcgccgcgctcttcgcagcgataaaaccgtactgcgccgtttcctttccgccatgccaaatgaggttgatgacgatggctgacacagcggccaaaccgatgcgcacggccaatatgacgccaattctgataccaacctttgcggcaactgtcgattcgataatcaagttatgacagaaagaaagcataacagctaaaataaagacttctttcacagataaatccaatgttaaaatcccggcaattcccgcatacagattcagcatatttcccagtacaagcggaatggccgcttcaccagaaagcccgaagagacccattaccggtgtgatcagccgtacaagccaatccatgacaggggtatgctgaagcaaagtgaccaatagcgttaccgggaaaatcactttacccagcgtccatgttgtttgaaaacctgctgcaagaccggccagaaagatcttcttcatccctcatcccctttgttgacgtctactccgcgtaccgctccttcgaatatcccttgacgcgtctgaagatgatggctgccacagccaaaacaatcaatacgattgaaatcacctgagcgatgcgaagtgaatcagtcagcattaagctgtcagtccgcattccttcaataaagtatcttccgattgaataccaaatgatatagatcaagaacatctcgcctctacgcaaattcactctgcgcagcagcagtaaaacaatgacgccgacaaagctccatagtgattcatataaaaaagtaggatgataatattgcccattgatatacatttgattgatgataaattcaggcaggtgcaggttttctaaaaaggctctgctgacagcctcgccgtgcgcttcctgattcatgaagttcccccagcgcccgatcgcctggccgagcaaaatgctgggcgcggcaatgtccgcaagcttccagaacgaaagttttttcactctcgaaaacacataacccgttaaaatggcgccgattaatccgccatgaatggcaatgccgcccttccaaatcttaatgatttctcccggatgtgccgcataatagtcccattcaaaggcaacgtaataaattcgcgcgcaaataatcgcaattggaatggcaaacaggacaagatcaataaacgtatctttctgcagcccccgtttttcactttccctcatcgcaatccacagcccgagcaaagcaccgagaccgataatgattccgtaccaatggacggctaacggccccagctgaaatgctatcggattgagtggttctatcgcttcattcatttaacgccaactcctattcttcttgttcaccgtcttcaatgacgtccgccagcttgttggtaaattgttcagcggcattcagccccatccgcttcaatctgaagttcattgctgccacttcgatgatgactgcaagatttcggcctgggcggacgggaatcgtcagttttgtaatttctgtatcaatgattttcatggtctcttcctcaagtccgagccggtcgtattgcttgccctgctcccagagttcaagattcatgacaatcgtgattcgtttattgcttctgaccgcgccagcgccaaatagcgtcatcacattgataatgccaaggcccctgatctcaagaaggtgctcaattaattccggagcgtttcccacaagagtatcctgatcctcctgccgtatttcaacgcaatcatcggcaacaaggcgatgccctcttttcacaagctccagcgctgtttcgctttttccgacgccgctctttcctgtgatcagcacgccgacaccatatatatcgactagaacgccatgaattgctgtggtaggcgccagcctgctctcaaggaagttggttaaacggcttgacagtcttgtcgttttcagcggcgatctgaggacaggcaccccatttttctcggaggcgtcaatcagctcctgcgggatgggcatatctctagaaagaataatagctggtgttacatcagtgcacagagaatccattcgctgttttttctcctcttcaggaagctgttcaaagaaagaaagctctgtttttccgagaagctgcacgcgctctctcgggtaatatgtaaaatatccggcaatttcaatgcctggtcttgataggtcactcattgtaatcgggcggttaattccttcttctccgctgattaattccaaattgaactgttccattacgtcttttgtgcgaacctttgccacgatatgttcctcctgttccgggctgccccgagcttgctcacaatactttcattttatcactttcaggcttgaacctaaaacagattttataaaaggcgggaaaacacctcagctggtctagatcactagtctgaaaaagagtaaaataaaggtattcaaattccagaaaggcggatcatctatggcagagagtcttcttatcaaagacattgcgatcgtgacagaaaatgaagtaatcaaaaacggctatgtcggaatcaatgacggaaaaatcagcacagtctcaacagaacggcccaaggagtcatattcaaaagaaattcaagcacctgcgaattccgttttgcttcccggcatgattgacattcatatccacggcggctatggtgcagatacgatggatgcaagcttttctgcgctcgacatcatgtcgtcaagactgcccgaagaaggcacgacgagctttttagccacaacgattacccaagagcatgggaacatttctcaagctttggtgaacgcaagagagtggaaagcggctgaagagtcctctttattaggtgcagaactgctcggcattcatttagagggcccctttgtttcgcttaaaagagccggagcgcagccaaaggagtggattaggccttcggatgttgcgcttttcaaaaagtggcagcaggaggcaggcggactgatcaaaattgttacacttgcgccggaggaggatcagcattttgaactgatccgccatttgaaagacgaatcgattatcgcatccatggggcacacggatgccgattccgcattgctgtcggatgccgcaaaagcaggggcgagccatatgacccatctgtacaacgcgatgagcccgtttcatcaccgagagcccggagtgatcggaacggcgctggcccatgatgggtttgtgacagagcttatcgccgatagcattcactcccaccctttagctgcaaagcttgcttttttggcgaaaggcagcagcaagctcattttaattaccgattccatgagggcaaaaggcctgaaagacggcgtatatgagttcggcggccaaagtgtgacggtaagaggacgaacagctcttctttcagacggaacccttgccggttcgatcctcaaaatgaacgaaggcgcacggcatatgcgtgagtttacaaattgctcttggacggatatagctaatataacttctgcaaacgcggccaaacagctgggcatctttgaccgaaaaggcagtgtgactgtgggaaaagatgcagatttggtgattgtcagcagtgattgcgaggtgattctcaccatttgccgcggaaacattgcatttatatccaaggaggctgaccagatatgaaagtaatggaatgtcaaacgtatgaagagctaagccaaaaagcagccagaataacggcagatacaatcaaagaaaaacctgatgccgttctcgggttagcgacgggcggcacaccggaaggcacttatcgcgagctgatccgcctgcaccaaactgagaatctctcatttcaaaacgtcactacagttaatttggatgagtacgccagactttcaagcaatgacccgaacagctatcacttctatatgaatgaccgtttatttcagcatatcgacagcaagcctagccggcattttattccgaatggaaatgcagacgatttggaagccgaatgcagacggtatgaacagctagtcgagtccctcggcggcactgacattcagcttctcggcatcggccgaaacggacacatcggctttaacgaaccgggaacctctttcaagtcgcgaactcatgttgtgacattaaatgagcaaacccgccaagcgaatgccagatattttccttccatagacagcgttccgaaaaaagcactgacaatgggaattcgaacgattctctcaagcaaacgcattctgctgctcatttctggaaaaagcaaagcggaagctgttcgtaagctgttagaaggaaacataagcgaagattttcccgcatctgctttgcacctgcattccgatgttacggttttgattgatcgtgaagccgagtcattaagaccttgaaaggaacatgctgacttatgaatatcaataaacaatcgcctattccgatttactatcagattatggagcaattaaaaacccaaattaagaacggagagctgcagccggatatgcctcttccttccgagcgcgaatatgccgaacaattcgggatcagccggatgacagttcgccaggcgctttctaatttagttaatgaaggcttgctctatcgcctgaaaggacggggcacctttgtcagcaagccaaaaatggaacaagcacttcaagggctgacaagctttaccgaggatatgaaaagccgcgggatgacaccgggcagcaggctcattgattatcagcttattgattcaactgaggagctcgcggctatattaggctgcgggcacccctcctctatccataaaatcactcgggtgcggctggcaaatgatattccaatggcgattgagtcctcacatattccgtttgagcttgcgggtgaattgaacgaatcgcattttcagtcgtcgatctatgatcatattgaaaggtacaacagcataccgatttcccgtgcaaaacaggagcttgagccaagcgctgccaccacggaagaagcgaacattcttggtattcaaaagggagcgccggtcctattaatcaaacgaacaacatatctgcagaacggaacttcttttgagcatgcaaaatctgtatacagaggcgaccgttatacatttgtccactatatggatcgtctttcataaaaaaaaagcctccaaccctttttaaggattggagacatggcgaaaatcaaactggtctggtgctggacgatatgtctcttttttcgtcttgaacttccagatcggtgatttcgttttgccattaaaactgtcttccactataatgtaccaataataaacagactgcggttcaagatgatcccagcggaattcagctgtatccccgctcttcacttgctcccgttttccgagctcttcattggtatatacgttacattcaaaataatcggtttccacctttttgattcttggcttcaaatcaagcgaaagggaaaattcatccttgttgccataggtatccgtatcatagtaattcttatcctttacatacggagaatacgtcgatacgtgcaccatgtcattggcctggtcaaattgaagcaaacgcaaatacccttgaccgccttctggcccgccctgataatcggccagcatttgatgcacaagacgatccggcttcccatcaccatcatcatccagctcatctgtttttctcatcgcactatgataatgcccgctcaataccatcacgacattcgggttcggctttacgatttctttgaatattttctctccgattgggcttctgtttccgctgaccagcaaatactcatgaaaagctaaaatggccatccggtcagggtgtttcttcagcacctgattcatccacgcgatgtcttcatccgtaatgccccatcccatgtacagcatgatataatcattgccgttgctagaaatcaggtcataatgtccgcggttatttttataggaaccgccataatgcaattttttatcaaaacgatcgctgccaaaatatttgccaaacaccctgtaggagccgtccttatgtccgacatcgtgattgccggccagcactccgtaaggaattccgctcttatccagaacggacattgaccgatcagcgtttttccactgtctgatatcggcggaatcatctacaatatcacccgtgtggaacacatatttgatattgagctgcttttgattatcttttatccattcggtctgtttatcaaaaatatgcggatagctttcggcgtaatactgtgtatcagacatccagacaaatgtgtacatatccttcgcaggaggaatttcatcctgtacaatcacattcattttcgactcccgtacaaaatcggcggcaatcacagacgctttcagcgtaaacggtttgtcatccttcgcgacgaagctgtcaacaggctgccattcgtttgtccgataattccaagcatacatcgtcacctttctccccggcaaagaactgcccttccagaccgcttctgccagatcattctcatcaattgatggatcaaccgtcacttcaaagcgatgataagggaaaagctctttgttttctgtcgatactgtttttccatcagcagctgatacccgctccaattctttattcgtaaatggggtctccctttccggcacaaagcttttcggcggttcagtcagtgacgcgtgcttaaatattttcacatgattgcgcgctgtatattgaaatcccctataaaaaccaacatccatggcgtcattcgtcggatctttcacccgtacagaaagcttggccttatgcgtgtcggcttcgctgtctataacctccggctggtccggatgctctcgttcggttttaaatatcctctcaatcactgttttattgcccgcgagatccgttgctgtcacttttagagaatgttttcccggcaaaaggtcagaagatgatgtatgatatgggagtgtaatgctttctccatctaaagacgcttccgcttcctcaattttgctccatttatcatacatatccgcctgcaggataaggtttcctttatacgtttgcccctcggtgatattcggctcaatgtgaggtcctgaattatctacccgtacaaccaggctgacattttccttgccgtcgcttgcttgaatatggtgagcgccttcagaaagctttgatgtatcccactccagcagctgtgatgtaaatagtccgtcaggcagattgaactgaaattgccagcttttattcgagcgctgattatcgccaataaagagttccttctcaggagacaccctctgatctctgatcaccgttccatccgataacaccaatcgggcgtttttgactaagaagtcatcacggttttcagccgtatcaaacggagacaccttcgaacctgaacgtatcgtaatacgctgcagctgcttccctttccgaagcagtgtctctggcaatggaacagaataggtgcggtatttatttgttgtatcatcgaacaccttcagcactttgccttccatcgttaccgcgtttttaaaataaaggttcgttttcctcgtatcgaatgcaaaatatacttctttttccatcgcgggctctgtcacttgttttttcccgtcaatccacagcttaatgctgtcagctcgcccttctgtcgtggctttgagaaattgagttcccgacagcgtgtctctgttttcaatattcatccgcagaccgtgcgccttgcttgtttgtttaatatcaatcattttgaccggcgttctcgcttcattgatcccgtccccggccgccacataatactctagctgatccttcccgatcaattcaggcgaatacacaatataatggaagagattatcgttgcggtctttttcagcaagaattcgcttaaacggtttgttctcatccgtccggtagtaaaaggccgctgttttcactaggcttcggtcccgtatgtcagcccgcagctcaatgctttcagcagggcggacaggcttgcggtcagtccaatcctcaatgaccggcttttctttatcgagcttgattttccgtttctgctcgggcacctgtgcctgtaatacggttccgggagacggattcttttctccgattgaaatgttcagaagttctgcggttccgttcaacggatacttataaagcactgatgacagccggcgcagcgcatgtttccgataatgcgcaaccgaaatgtcctttcctgtattcgttgatatcacaacggcccgcggcctcgtattggccataccctctgtctcgtctatcaccgcgagattttttccttccgttaattgtgtctggtaatatcgattgaaatcctccgccgtcaattctggatgcccggcaggcttcagccagacgacaaacgtttcgccggatggtatcaagatcctttcatcaggtctccaaatcagatcggagtcaggcccttcttttgggtagcggtaacggatatggtagtctttaaaatcaatcgttctgtcagtcgtattaaaaatctcaataaattcataaccgtctgcgcgtcctatattcttcgtatcaaccgccagctctgtgatcagaagctccggaatatgggcaaggtcagcctggtatccttcaagcttcagtttcttcgtctccgactcaacccgctgcttcccattcgacatcacaatgtaatactcaagctcgctgttccaaatcaaacgtttcggaatttgtgccaaaaacttgcggaccgctccgggggtcgggtccatcggcaccattttgtagcccagctcattactttgtttataaaaaagaaaggcggaaaatgcttgatacgaattatcgcgaacttgagcctcaatcattagattgcttctcatttcagctttcacatcaatttgaggaggattttcaagcaagggtatgtaatgaggcgtctgaaatggttcctgctgaacaacaggaaaagctttcgattcatgatggccgccagacaaaacggaaagaaaagacaataatatagaagcaataaccgtgtatttcctcatcaaagcacctcccttttcatgtattttgcgtctgaacagggaagcttatgagttcatttttgtgcataaagaacaaaaaaacgtctgtctcttgaaaattccactattacctagtaaactaaggatagttaaccagttaacaattaaatcagagaggcaaattgatggacaacagcattcatgatgaattatttcaagctatacaacaattcgcattaaaaagggataaacgcgtctggcaaaaggtgcagataccatccattggcatatcctcacaacatcacgatcacctcaaaaaagactggactttgacccagcttcacattgtttcctgcatacataccagccaaaatgtgaacaacagcttcttagcatcccgtttacacatctcaaaagccgctgtttcaaaagcggttcatgctttgttgaaacacaatatcattacagtgacaaaaaagcctggcaacaaaaaagaaattttttatacgctaactgatagcggcaaagaactggcggggttacatgaacggcttcatcaaaaagcaaaggagcaatacaaacagctcttcaatgaattttcaattgatgagttgaaaacagtgactgcgtttattaacttgtggatcaagcatatgtaaaaaagcctcacccgcacgggagagacctttccatattattaagccctgtcaaatacaatatgaagtgagacgggtccgcgtgtatacagaccggactcagcataacaaaaatcttcctctaatctgatattccgcatcttatccagcacaatattagctacaatttcgatttcggttttggcaaaagctgctcctacacagttatgaatgccggatccgaaagcgagatgccgggcggcgccgctaaaagcgctcttgatgccaagatcttcccgatgaatattaaacacgtcaggctgttcaaatgcttcagggtcccggttagccgcaccgatcatacaaaaaacaatcgtatcttttttgatttccataccgccgaccactgtatcttgggacagctgccgcggaatcagctgaaccggcggtttataacgcaatgtctccgcaatggctctcggaactaacgaacggtcagccaaaacatcattcatctgctcaggattgttgagcaaatggtagatcatcagtgccagcgtcttatcagccggttccgttgcggctaacagcacattaagaatcagtgcgagtatatccttgtccgacatcgccatgccttcatattcagaagtacataggatggaaattaaatctgatcccggattgacgcgacgttcttcaatgaccggcatcaagtattgggaaagctgttcgctgcaccataacgaatgtgcccgcgcttcaggagattgagagatactcgtgataaaatcggcaactccgctatgccactcagagattttttcatggtctcttttatccagcccgagcatgtccatcgtgacgcacaccgcaaacgtctttccaaaatcattgacgagatcaattttccctctttcaagataaggcgctaacaagttttctgcattttgtttaatcaatggagacagatgatccagtgcgtcaccgatgaagcttctcactacaattcttcttttggcagagtgttcttttccatgcatttgggccagcacagggcctcgcattactggttcggcacgctcaacaagtgatttcgtcgtgaaaatatccggatgctgaaggatatagcggacatcatgatagcggctgataaaataactgtctatcgactcttcataatgaaccggatcttcctcccgcagttgtgaaaaataagcatatggattgttttgaaattgatcagaaagcacactaaacaatttaatcgattggctcatgttttactccccctatcatccttcacatgtgatccgtttctcagaaagcatctgcgccatttcctgtacaatgagatacccgtgattcgaccgcatacaaatagaaaattcatggttactgatcttctcaccgagcttccacggacgatgataagcaaggagcgtctcttccacctctaaaatatccggagctccgataaaaaacggcagctcagctatgacatattccacagccaaattcagcatatcctcactgacttcttccatcatcaaactgacgccccgtgcacgcccgattatcgcttcacgagacatgtccaaacaagcatgtcgaaaatgaggctgctcaaaaaaagcatgttcaacttcttgtctcaacagctggtaggctttgttatccataaaatcagaaaatgtatgaatcgccttcggatccccgccatgagccacaagggctctttctgcaaatctcctgtttcgtgatacctctttccttacttttcgttcagcctttcctctcggagttccaagcgcttctagaagattagccgcctcatgccctgcaagtaaaactgaaacgcttttaaattgagctttcgcccatccaattaatctgtaaatataatcctctgaaaacctgctgttaaatgggctgatccccaccaaaacatgcctgcgccgttcaaatatttctctgcagttttctgttaatgcctcagcaataaaatgcacagaccttctttccgttaccattccggtcatctcattcacccctaaaacttatcccgctttaagtcatcaccctcaaatacaagatggaatagctagaacaactgaacaagacgaatggcaggcagcacttaaagtttccaaatgttttttaaaattttaattactatttccatttcacatatcatgataaatgtttactagtaaacattagtcattttatcccttttccttccaaacgtcaatatgatctgtgcccaaatatttgaaaataaatgtaaacatcacattttccacacactttttacacgcatattcagcatgacagatcaacaaatagtctaaacaccaacaattgacaacgaaaacaagaaaagataaaatgaaattgttcaccagtaaacaatttgttttattgtttcatcgtaaactattattactaagaaagaaggtagcctatgtctgatttgacaaaacagatgatatacgacatatacgtgagactgctgcaccttaatgaacaaaaagcgaatacttcacttcagcaattttttaaggaagccgcagaagaggatgtgattgatatccctaaaaacatgacaagcatacatgtcattgactgtatcggccaacatgaacccattaataatgccggaattgccagaaaaatgaacttatcgaaagcgaatgtaacgaaaatcagcacaaaactgatcaaggaagaattcattaacagctatcagctgacagataacaaaaaagaagtttattttaaattaacccgtaaaggcagacggattttcgacttacatgagaaactgcataaaaaaaaggagctggctttttaccaattcctcgattcattttcacaagaagaacaaaaggctgtattgaagtttctagagcagttgacgtcaacacttgaagcagaacaaaccgatgggactccggacaaacctgtaaagtaaacaaaaaggcggtgtacactttggctcatacaaaatcaaaggcagtattgatcttatacactgtttgcttcagtgcattttttgcatctttaagccagaacatttattcacctattcttccgatcattaaagaatcattccatgtttccacagctatggtgaacctgtcagtctcagtttttatgattgtgacagcaataatgcaaattatattaggagcgatcattgattttaaaggcgctcggatcgtcttgattaccggtattctggcaacggcagcagccagcatcggctgtgcggtgactactgactttactttgtttctgatattcagaatgatacaggcagccggttccgcagcactgcctcttattgctgccacaacgatcggacagctgtttacaggcaatgaacgcgggagtgcaatgggaacgtatcaaatgctcctgtctgtcgcaccggctattgccccagttctaggaggattcataggcggagcagccggatacgaagggattttttggatacttgcggccatctctatcgttttgctggtgacaaacagcatcacctttcctaaagattctccaactgaatctatgcagcaagccaaaggcaatgtgttcgctcattataaatcaatatttacaaatcgaacagggaacgtcattttgactttaagttttgttctctttttcatttattttgcagtaattgtctacctcccaatattgctgacagagcattaccatatagatgtgggtatagcaggactgttatatttgccgctggcgctgagcacgattgcaggtacgtttctgtttaaaagaatacaggcaaaaatcgggctgcacaccttgtttatcggaagcaatgtgattgccgcctgcagcatcattttatttgctgttacacattccgtttctctcgttctcatggctctgacgctggcactgtttggcatctcgatgggggttattcctcccttgtactctacaatgattactaatgaatttgagcacaacagagggagtgcaatcggaatgtttaactttatccgatatacaggcatggcagcaggtccgatggtatctgcctacttgctcacaatgatgccgtctgccatgtcctttagcctcctaggccttggatttgccgcattgagcttttgccttcttccgccaatgttttcgccgcagaagcgcacgaaacaaaaaaagcaccacatgtaaaaaagctgcctttgcgggcagctttttttatttttttctaagcggctctaaaatgcctttttgaatcagcaaatggaagaccgacaggataacggatgcccatatcgctgtgccgaagccgtcgatttgaaagctgtcacccataatggacgcggtcatcataagcgtgatggcgttaatcacaaacaagaagagtccaagcgtcaccatggtgaccggcagtgtaaatataattaaaagcggtttaatcagcacgtttaagatcgataaaatgaggctggcgataatcgctgccccaatgctgctgatatggatggagtcaatatatccatcaatgacgattaataacaatgcattgactaaaatgctgactgcccattttaccatgtcatttcatatccctttctgacgggacgataaaaatccaaatgatataaatgagcaaaaccggcaagacacttgtcataatggctaagatgacagttatgactctgaggagtgatgcgtcccaattgaaatattccgcgagacctccgataacaccggcgattttcttatttttttctgagcgataaagcttattcattcgatcacctctgtgagtactttagtttgatggcgcctgttagtgattctgagaagacggtgatgttttgatcatgtgcctgatttgaagtgaacatcatttctttttgaatcgtatcatttttttccttcagcatctctacatccattaattcatgggacagcgtaccaagattgcttttcagctctgccttcactgcgagatcgtccggaattgcaagctctacatttccagtcgttgtttttgcataaatggagcggcagtctgattctgttacgttaatcgcaatatttccgttaaagctttgaacgtcaatggattcgcttttccctcggagatcgatcaatccgttaatggtttccgcttctatcgtaccgcagctgtggcttgcgagcttaatttgcccgttggccgtttcagctatggctttttcggctgttaaatacgagaacgacagcacgccgtttgtcgttttcgctgagaactcttttacatgtaaatgttcccctctgaccggaccgttaaacagcttcacccgaatcttatcatactccttctgaggaatatacaaagtgacattcgttttcatcgtctttttctcagtacggataaaaaacttattacctttgatttcacattcaatatgctgaagaaatgcgtgtctcgccgcatcctggttgtcagcgcgatataccttcgcctggcattccgctctgatatcgtcatcttcccaagggacgatatttacgctgccattggcaatttgcagctcaacactggaaaagtcagtatctttaaattgaaaaatgtgctgaacatcatacgcatggccaaagtttaaatcaaggtcaacttccttgacctttttcacagcagaatcaatccagtcaaacagcttggctcctaaagacggtttaccgctttctttttttgccgttgtaaatggctcttcctcgtcatgaacgtgaactgagagcgctgtgattttctcttctttttccttgtagtcgctgtcaagcttttcaatcagtgtcaaagcttcttgtgctgtaagctttccttcctcaacaagcttaaggattcgttccttttcttgcttcattacgatctcctccccattgtctacttatgctgcacgcaggaccttaatgccctgaatcacattccaaatgataatgccaatgacaactaagaaataaataaccgctcccccgatgattacaaatacaggaagcaagctgtctccatcaatcgcaacggctccgccaagtaaagcaataaaaaggaacagccagccgacaaacggaacaatgtgagaaataagagagcgtatcgcatggcgttttgtttctttctcatttacaacaaaatatgcgacaatcggcacaatgattggcgcaatgaacacactgaaataacaaagtgatgcaataatagcttgattacggttcaattcattccacactcctattgtgaattgtccatgacaaaagatcagggacgttttacttatttatacgtttaaaatctcttcaggtttcaaattcattctttagacatgctccgatttacggaaattggattttaaaaagttttagaagtagaatcttccggctataccgattacaatatgtaaaaagcttacggcaaccaaggaggctggacaagcaatggagaaagatcccagtgactatacagtaacacaagaatcagtgttaaagctgattcaggaacaaaaaagaatgaatcgtgaaatgatcaccgagcttgagcagattcacggacccttcccgatctctcacgatatccaatatataaaagtgctgctcgacagcagcaacacacatattgttcaagatttaatgagtgtaagtaagcagctgtataagaagactttgtaattgcggaaaacatatcattcattataactgaaacaaagctaaaggttagatgacaatatcttgccttttttgttttgaaaaaacaagtgattccctggctgtcacaaaatgattgtaacaaaaaaaagcctgccggcacatccagttaatggactctgtcggcaagctgtaactatcagaaagagatagccgttcaaaattaacgtaacaattgaagcacgttttgcggctgttggtttgcttgagcaagcatcgcttgagaagcttgagaaagaatgttgttctttgtgaaatcgctcatttctttcgccatgtcaacgtcacggatgcgagactcagcagctgttaagttttcagaagaagcaccaaggttgttgattgtgtgctctagacggttttgtaccgcaccaagtttagcacgttggtttgaaacacttgtaattgcactatcgattttaacaatctcagtgtcaaaactaaaatcatctgctgaaacatcgataccttttactcctaaagttgttgcatccatgttaccaattgtaacattaatattttggccagcatttgcaccaatttggaatgtaaatcctgctgtttcactaccgtctaaaagtttttttccgttaaattcagtacgttgagaaattccatcgatctcttcagttaaagcatccatttcatctttaattgcagttaaatcttcagtttgctgtgtacctgtgtttcctgcttgaacagtaagttcacgcatacgttgaaggattgcatgggtttcagtcaatgcaccctcagctgtttggataagagaaattccgtcttgagagtttttagaagccatttcaagacctctgatttgtcctctcattttttcagagatcgctagacccgcagcgtcatctcccgcacggttgatgcgaagacctgaagaaagtttctccatgttttttgagctcgcactgttgtttgaagacaaacggtttagtgtgttaagcgctgcaatattgtggttgattctcatgtgaaaaatacctccatgtgtatatgtttttgaaatcaaagacttccttttctttgatttctggcgtatcagattccaataaagcttctaacctatgtagattcagttattgcttaaggatgcctttaagccccttaatagggtttgtctgcttaatttggaaatcatcatccgcctttcaattcatatatcgacagccatttgtaaatgtttaggcgttttcccaaagaaattataccaaagacgaatctaaacctattatgccgtaaagaaaaagcttgcctgctaagcccaaggatggacttgctgacaagctgtcccctcttaacagaggtttttttaagatgtagctgtttcttttgctttcaagagcgatttcatgcgtgttttgtcacgttcgataacaggcttcaaataacggcctgtatacgattcttccacttcagtgatttcctcaggcgttcctgacgcgacaatggttccgcccccggctccgccttccggtcccaaatccacaatgtaatcggccgtcttaatgatatcaaggttgtgctcaataaccagtacagtgtctccgttgtctaccaaccgttgcagcacgacaagaagcctggcgatatcgtcgacatgcaaacctgtcgtcggctcatctaaaatgtagagcgtgcgtccggttgagcgtttgtgcagctctgacgcgagcttcacgcgctgcgcttctccgcctgacaaggtcgtcgccggctggccgagcgtaatataacctaaaccaacatcataaagggtttggagcttgcgtttgattttcgggatattttcaaagaaagaaagagcatcttcaaccgtcatatcaagcacatcagagatgctttttcctttgtacgtcacttcaagcgtttcacggttatagcgtttgccgtgacacacctcgcatggaacgtatacgtcaggaaggaagtgcatttcaattttaataatcccgtctccgcggcaggcttcacatcgtccgcccttcacgttgaagctgaaacggccttttttatagccgcggaccttcgcttcatttgtctgcgcgaatacatcacgaatgtcatcaaatacaccggtgtatgtcgcagggttggatctcggcgttcttccgattggcgcctggtcaatgtcaatgactttatctaaatgatccaaacctttaatctctttatggctgccgggcttcgctttcgctttatgaagcttttgcgccagcgccttatgcaaaatttcattaacgagtgtactctttcctgaaccggaaacacctgtaactgctgtaaacgtcccaagcgggaacttggcattcacttttttcaggttgttttctgaagcacctttaatttcaatgtaacgtccgtccggctttcttctttcaggaggtaatgggataaactttttccctgataaatagctgcccgttaatgagtttggatcttccatcacttcttccggtgtacccgcagatatcacctgtccgccgtgaatgccggctcccggtccaatatctattaaataatctgctgccatcatcgtgtcctcatcatgttcgacaacaatcagcgtgttcccgagttctctcatatttttcagagcgctgatcaagcggtcgttatcacgctgatgcagaccgatagacggctcatctaaaatataaagcacaccggataagcgcgagccaatttgagtcgccagcctgatgcgctgcgcctctcccccggacaatgtacccgctgccctgctcaatgtcaggtaatcgaggccgactttgtccagaaagcttaagcgctccacaatttcgcgcaaaatcaaattggcgatctgcatatccttctcagaaagggtaaggtctttaaagaaggcaagtgcgtcggcgacagacagctcggtaatttttccaatgtggcggccgtcaatcagtacggcaagcgcctctttctttaaccgatagcctttgcacgtcggacaagatttctgagacatatactgctccatttgctcacggatgaaatcagagcctgtctccttatagcgtctttcaatgttgcgcaatacgccttcaaattgaatttcaccttcgcgtatttgtccaaaatcattttcatatcggaaataaatcaggtcatccccgctgccgtacagcactttatccagttgatgcttcggcaaatctttgaccggcacatccatatcaatcccgtagtgggtgcagactgcctcaagcagctgaggataatattgtgagctgatcggtgtccaaggggcgaccgcattctccttcaatgacaaatcttgattggggatgacaagatcggcatccacttcaagcttcattccgagaccgtcacacgtcggacacgccccgaacggactgttaaacgaaaacagacgcggctcaagttcaccaattgaaaatccgcagtgcggacaggcataatgctcgctgaacatcagctcttcctcaccgatgacatcgatcataacccgtccttcacctaaacgaagcgccgtttccaatgaatctgacagccgggctgccacgccttctttcacgacaatccggtcaatgactacctcaatggaatgcttcttgttcttttctaattcgatatcgtcggaaagctcagccatctcgccgtcaattctgactctgacatagccttgtttcctaatctgttcaagcactttgacatgagcgccttttcggcccgagacaatcggcgccagcacctgaagcttcgttcgttccgggtattccagaattctgtccaccatttgctcgatggtctgggatgtaatctcaattccgtgttccggacaatgaggcttccctactctcgcatataaaagacgcagataatcataaatctcagttaccgtaccgacagtagacctcggattgcggctcgttgttttctgatcaatgctgatggcgggagagagccctcaattgcatccacatcaggcttatccatttgccctaaaaactggcgggcataagcagacagcgactcgacataccgtctctgtccttcagcatatatcgtgtcaaaggcaagggaggatttacctgatccggacaaacccgtgacaacgacaagctgatctctcggaatcgttacatctatatttttcaggttatgcgccctggctcccttcacctctatccgatccatagccatttgttcatcatccttccgcttttagctctaaaagtaaatcgcgaagctccgcggctctctcaaagtcaagcgccttggcggcttccttcatttcatgctccatctgttcaacgactttctggcgttctttcttcgtcattttcgacagcttcggcgcggcttttgttttgtattccgctttatcctcagctgctactgtggcacgaatgacatcgcgaatttctttatttatcgttttcggcgtaatgccgtgctcttcgttaaaccgctcctgctgctcgcggcggcgttttgtttcattaatcgcaatttccatagacttcgttattttatcggcgtacataatgacgcggccttccgcatttctcgctgcccgtccgatggtctggatcagcgaccgctctgaacgaaggaaaccttccttatccgcatccaaaatcgcaacaagggatacttcgggaatgtccaaaccttccctcagcaggttgatgccgacaagcacatcgtacttgccaaggcgcaggtcgcggataatttcaatccgttcaagcgtcttgatctcagaatgcagatagtttactttaatgccgatttcttttaaataatcggtcagatcctctgacatcttcttcgtcaaagttgtcacaagcacccgttcattccgctcgattctagcttgaatttcgccgatcaagtcgtcaatctgaccttcgattggacggacgtcaataagcgggtcaagaagccccgtcggacgaatgatctgttcgaccatttcatctgtatgttcaatctcgtacggccctggtgttgctgatacatacacgatattgtgcatatgcttttcaaattcctcaaaacgaagcggacggttatcaagcgctgatggaagccggaagccgtgatccacgagcacctgtttccgcgcctggtctccgttaaacatgccgcgcacctgaggaattgtcacatgcgactcatccaccacgatcataaaatcgtctgggaaataatcaagaagcgtatacggcgttgaacctggaggccgcagcgtcaaatgtcttgaatagttctcgatgccggagcagaaacccatttcacgcatcatttcaagatcatatcttgtccgctgctctaaacgctgcgcttcaaggagctttccgttttcatgcatgaccttcagctgctcctcaagctccttctcgatattttgaatcgccttctccattttctcggcccgcgttacgaagtgggatgccgggaaaatcgcaacatgatctcggtcgccgagaatttctcctgtcagcgcatccacttcccgaatccgttcgatttcgtcaccgaaaaattcaactctgatacaatgctcatcacgggatgccggaaagatttccactacatccccgcgcacacgaaatgtaccgcgctgaaagtcgatatcgttgcgggcatattggatgtctacaagttttctgagcagctcgttgcgctcaatttccatttcagtccgcagtgacacgaccatttcccggtattcctcaggcgaaccgaggccgtatatacaagacacactcgcaataataatgacatctctgcgctcaaacaaagctgatgtggcggagtgtctcagtttatcaatttcatcattaatactagcgtctttctctataaatgtatccgtttgaggcacatacgcctccggctgataataatcatagtagctgacaaaatactcgacagcattgttcggaaaaaattccttgaactcactgtaaagctgtccagcaagggttttgttatgggcaatcacgagagtcggcttattgacttctttaatcaaattagacaccgtaaatgttttcccagttcctgtcgcacccagcagagtctgatgcttcttgccctcctgaattccttttacaagcttttcaatggctttcggctgatctccttggggctgatatttcgagactaactcaaagcgatctttcacaaaaataagcctccgtttctttaacgaaatcttcctatagatatagtaacacaatggaaagcaaaatcactaaaaatacgaactaaagttcggtggttttttatttccagctgtttttgtgtataaaaaacctgcttttaaaacgtaaaagcaggtattcagtctttatattcattatgtccgatttattcttcttttttctctgcagcttttttggccatatacagtccgccagccacaagagacacaacatccaatcctacaataaaatacgtttctgtatagccttttaaataagaggcaaacagcaatgcagctgttaaagcgatcgccacataatgattaaaggtgactctagtaaatagaacaacaagcataaaagggaaaaacaatgcaaaaacggcttttgtaatcaacaaaaaccctcctcagggattcttcatctgatctgattatagtaaaaaatgaagaatcggacaatcgtgcattcgctccctctactacaccataccccttttcagccaaaatcaatcactatatttgcattttggtgccggtcaaaacttattccatggtgccgctgttctaatcagcggcactttttttattacatcatcaagtccgccgccagattccgagaataaaagaaaataggcatacagtaccagtacggccgcatttttcaggataatataaccaacttaactattcattttatttaggactttctgcgtttgacagcattttcctgaaaacctacaattaaatgatagtgtttactatcattttttaaacacaggctccgcaataaaaagactagagagaaaaacaaaatgaatgaagaaaagaggggtttcaaatatgtattctgttttatttcgccaggcagaagagtccagccagctggctggagcaaaaggaatgaatttgattaaattgaccaaacacggtcttcctgttccggacgggtttattattcaaacgaatgcgatcgcacgttttatggaggacaaccagcttcaagagactagtgaaaacgtcgaaggcgggatcatttccggaacattttcggatgagctgaaagatgagctgactagttccttttataagcttagagaatcatatcgatccgtagccgtgcgttcttcgtctgcctcggaagatttagaaggcgcctcattcgcgggtcaatatgaaacctacttaaatatcaaaacagaggaagaatttctggctaaagtgaaagaatgctgggcttcatttttttctgggcgggtcagcagctataagaaaaaaatgaacaatcaaatcgcagagccgttaatgggtatagtcgttcaggggctgatcgattcagaaatgtcaggtgttatcttcagccgcaatcctgttacccatgatgatagagagcttttaatcagcgccagctacgggttgggtgaagctgttgtttcaggaagtgttaccccagacacgttcattgttaaaaaatcttcgtttgagattcaaaaagaaataggtgcaaaggaaatctacatggagtctgcggcagaaggaattgctgaaaaagaaacgagtgaagacatgcgcagccgtttttgccttacagatgaacaagtgattgaattggctgaaatcacaaaaaaaaccgaagacctgtacggatatcctgtcgatatagaatttggaattgctgatcatcaaatataccttctgcaagctcgtccgattacaaccattgatcaggacaaaaaggcggcagaagaaaaacgcagcttcatgattaccgacactgatatgaatgatttctggcttaacatggagtctaatattgaaggtccggtgagtccgttattttcatccttcatcgtgcctgcgttggaatatggcttgaagaagagcatgcaaaagtttccgattggtgtagttgttgatgaagtaaaactttatcgcggacatatttattccaaaaaccaaggagggcagcagcctccttctgaagactgcggcaaagagcttttcccgattttatcggagcatatgtatgacatcattaatcacacatacctccctttttaccggacactggaccagctcgcacaaactgagcataccgcagaaagcgcactggatgcttttcaaaaactaaaggccttttatctcacggcttatgaagagcacttcaatatcgttttcccgcaaatccttttaacaaacaaactgcaagcgatgtatcaggacattcaaggagagtccgaaaacgctcatttttacgagatgctgacaggaaaaatgaacaaatcactggaaacggaccgttgcttatggctattttctgtggaagttcaggagaacccgaaccttctggccatttttgaaaacaacaagcctgaacaactccaggagaaattggaacaaacagatgagggaagacacttcctgaagaacgtccatgaattcttgcaagaatacggatggagatctgttaaaagtcatgatctgattgaacaaatctgggtggaaaatccgtatttcgctctggccaatattcaaaattatgtccgtaatggctatcattttgacaatgaatttcagaaaacgaaagaaaaacgagagaaattatacaatgaattcttggaaaacatagaagatcccggtttacgcaccgaatttgaccgctattatcaatggacactgaactctgcaaatataaaagatgatcaccacttttatattgacgccatgctggatgccaaggcgagaatctttctgctgaagataggtgaattgctggcggaaaacggtgtcattcaagatcgtgaggacctttggttcttatatgatgacgaagtggaacaagcgcttcttcaccctgtatccctgcaagaaaaggctgaaaaacgcagacagatttttcatgagtatgagctggcccaagccccggcctacctcggcaccccgacaaaagaacagctcaaagcagctgaagaaattgtcggcgctgtgatagaggatgaaaaaaacacagagaatcatatttttggcattgcggcatcaagcggcattgcgacaggtccggtgaaaatcattcgggacgccaatgaattttctcaattcgcgcctggggacgtactcgtttgcaagatgaccacaccgctatggaccagcctgtttcaagacgccaaagcgataattacagacacaggcggcattttgtctcacgctgcgattattgcccgtgaatacggcattccagccgttctcggcacacgcacggcaaccgaaagactgcgagacggtgacatcatcactgttgacggtagcagcggcaaaatcacagttgtcagccggtcctgatgcgtccccctctttcttatacaagcggggcgggtgtatacttgtcctgccagtatactcgtgaggtgaaacgtattgagaccgacaaacaagagaatccttgatgctgccatgcagctgctcgtcaaaaaaggatatcgcgcaacaactacaaaagaaattgcagaaaaagcaaatgtaagtgaagcgacgattttcaggaactttaaaaacaaacaaggactagttgaggctttgctttctcagcattcttcaaacagaggcagcattttggaacaaacagaaggggatttgtacaaagacctgcttcatatcggaacctgtctcttggaggagctcgaacatagaaaagatatcattaaaatcagctttcgtgaaccggccatgtttcaggatgtcattaaccacgtcactgaatatccccaatctatgaaacagctattggttgattatctcaaaacaatgggtgagaaaggggttattcagacaggaaatgaagcggagcatgccgacgtgttcatgtcgattatcttcggttatttcattcaccgtctccacttaggagaccgggtcatatcaatgccccaggaaaaaatgctggagcacagcacagctctatttgtcaaaggaatttctgctgattaactccttggcataataaaaaggaggatcccaatgagctcaagaaaagaatgggcgctgatcgtctcgctattattgggggccattctggttcccattaactcaacgatgatcgcggtcgcgctctcatctatttcccatacgtataacgagtccatcgcaagcatcacttgggtggttaccgtttatttaatcgtgatggcagtcacacagccgattgcaggaaagctcggtgacatgtacggcaataaaacaatgtacttatggggagtcggcctttttctaatcgcatctctaggctgcgccctttcaccgagtctgctcctgttaattgtctttcgggcattgcaggctgtcggcggggcattgcttacgccaaacagcattgccattatccggcatgttgtttctgaaaaacgcctaccgaaagtgtttggatttttcggactgggtgcgggacttggtgcagcactcgggccttttatcggctctatactgattgacagcttcagctggcattcgattttttgggtcaacatcccgttcctcgccattgctttatttacggcattaacgatgtttcctcaatataaagaaaataaatctgacgcgccgctggatatcatcggctctctcttgcttgcaggcagcatcgtttccattatcctgctgacgaaaaatgaggctccatggggatatgcggtatacagtgtattgatacttctttttgttccgctttttttcagaagagaaatacgtacccagcaccccatcattgactttgcactgtttaaaagctcaacctttacaaatgcgaatctatcagtcttgttaagcaatttgatgatgtatgccgtcttattgattatgccgttatttatgacgaaccaatttgggcttaatacgtctaacagcgggatggcgctttctgtattttcgatcttcatgtcagccagcaactgggtgggcgcgcagctccatcacaaatggggagccaaaaaaatcatttttctttcatttgccatgatggctggtgcgaatctattatttttgctgttaagcagctcgcattctgtcttattcctcatgctctctcttatccttggcgggctcgcttccggagtcggtctgaccagcatgcaggtgtcatcccttgccacagtagaccccggaatgtcaggagtggcatccgggattttctcgaccttccgttatttcggaagcatcatttcatcagccttaattggcctgatttcgggatatcacatcctatttatgattctctttgctgtatccatcatcggcgtttttgtttcattgggcatcaaatctgatgaaacggcacggatagaaaaaaactcagcgtaacgcaaaacagcccggcatcgcatcttcctgcggtgccgggctgccttttatgatccagaagcggctgcttcgtcttcacggtcatcctttacgaagaggatgcccaattcatgatgttctccttcataagaagctcgctggtcaaaacggatttctccattcaaaccgataatttcaagctttacatatgcacggttatgctgaagcgcttcatagaaatcagaaacgttcttaaccggtatgccattgactttcgttatgatttccccgattttcaattccagatcctcagccggcgtattggggataatcccaagcaccattaagccctgatcccttttcgagaaataaaacggagccgcgttatcattcactctttgctttatggacaaaaaaatgcgccctaacaaagcagtacagaccgctgcacccgcaagcggcgtccacagtaagctcgctgcaccgagaactgcgacggcaagaccgagaatacaaacgcgtttcgctgtgatccttatactcgtttcaggcagcgatccctgtaccctttgtccaaatccgacaaagtaaggaatccatagaaaatgaaatgagccgccgggaacagtaaacacgggccaccagctaaggtgcgattctaaaccattgccgggcacgagaaggaacagcggcaaaagccaaacccggtttgccagctgctgtccgatcggcaaaccgcggctgcttacgacaagtgccggtgatgttctcacatgcgcagaacgataagcaaccgctccttcagtgataatcagcaaacctagaaacacagccacagccggccaaacaactgcaaatccttgctgaaatctctccagaaagggctccgcctgatatatttgcagtccaaaacctatcagcatactcacactgacgatatatgcagcagacatccagtttgcgcgaagagtgaacgctgccgctgcagtgataacggcaataatcgcaagtaaaccgagaggaatcgatattccgagtccacctaaaataactgacaaaagaagacctggaatcagtccctttgtatatgtaaatttcagatcatcataaatatctgctattcttgtatgaaaggtttttcgttcccgtttgattcttacatagccgaaagccagggttatgatgataaaaaaccagaaaagcgggtgtaagaagaacaagcccgcgctttttaacagttcaattccccattgaacagacactatctctcaccgcctcaagccaaacatgttactcatattctatcaaatattaaatggcttggatatcctcaggagagtttatctctcttgcgtcatccacagcgtgacattcgatagtgaaaaatcctttaaatagtggtttacatccacatccaataacccgctgattagatgcatcgacctttttatatctgtcagattaattcctaatcgcttatggtttttcattaagtagttaaaataatgtttggcgcattcctcattaatgtcatttactgattcgacattggtgtaattgaccaaatatctgctgaacagcataagaagacttagtgcttttgtagctgaaaatgttacgtcttgtgttctgtcttttaattgttccactaattcataatattttttttcacgcacaatacttgccctcttcaattgtgaacccccattttctttatacagataagcacgggccagtataagcagcagtactggagtgctaacaagcattctcgctaacgttactctttaaatacctgtcgttcagctgccattaacctgattactgttctttttagaaccttcttatattgtatgaagtaaacaaagactaggcaacttgcaaaagtttcattttaaatgcatattaactcgttagaaagtctctctcatatattgatatcgggtaataacagtcctttataaatgtttatttgtgaaaatttttttaatttcttgtcaaaaactcattttttatgtgacttatgatccataatctctttaagtacaaagaaacaggagatggaataccatctcctttaattgacaaataatgatttcaatgctgtttgaagctgcaaatcatttttgtcatctgattttttcttttctatctgctgatttaatgtctctgcagtgcgagtgtcgatcacaccggttttattcagcttgttttgatcctgaaaagccataaccgcttttttcatgtctttgctgaaatagccatcctcacgtcccggatcaaagctgagaccttttaacaatacctgcgcatgcttgacgtcttcattgttcatgtccactttaagcggctctttcagctgtaaaggcccagcggaaaaataatcgggctgcttaatcgcaatggtcggttcaattcctttcttatgaatccaatttccatttggcgtcagccacttgtaaagcgttaatttgatgttgctgccgtcccccattggcacagcctgttgaaccgttccctttccaaaagacgtatcgcctacaacatcataatggccagcttcctttaatgcgccggcaagaatttctgatgcagaggcacttcctttatccgtaatcacattgacagggtacgcttttttatgggtcaatgttgaaaaataacgttttttatccccattgcgttcagcaatctgaatatacggctgatcctttgtaacgaaatgcttaagaatttcttccacactttgaagatatccgcccgggttgccgcgtacatcaatgacaagtccttttatttcttttttctcaagctccctcagcgcttttgcaaaatcctctgcggtgtgctcagaaaaagtagagatggcaatatatccgacagaatgcccctgtacttttttctctgatgcaaaaaccgtttcgagcggaatctcagctctcttgatccggaatgacagctgcttcttcgttccaggccgctgaatcttcattgaaacgctggaccctttttttcctcttatttttaacacagcgtggtttaaatccttgccggccatcgattctccattgatgctgataatttcatcattaggcttcaacccggctttttccgctggcgatttcttgaatggagaaacaataataattttgccgtcttccattccaacctcagccccgatgccttcaaatgaggaatcaagagaatcagaaaattgcttagctgtctgcttgtccatgtaaacagaataaggatcatttagcgtagacagcattccctggatggctccctcgagcagcttttctctatctactttttctacgtactcattcgatattaactcatacgctttttcgattttgtccatagctttatcccgttcagagtcagcttgtgccgtcgcgggaactgctgcagtctggggcttatccatctcaagcaggttgattcccgcatatacaccgacgcctccgaacagcatgctccctgctgctatcacagccattattttttgattcatcctttactcctcctgtatgccagactgtctttaccaaaacctagagatagtatatgtaaaggatggagatttcatgtaatcatagaagaaaaagaaggcaaatgaaaagccgtcccgaaaacggaacggctttttcactttatactcgcaaaaacttgcggatggaagtcagacttccccatactccaattactgcgccgattgcaatcagcactagcgaaacttggaatacaaatggattataaggaagaagagagacaaatgatccttgaacctttggaacgacccatccgatgacgtattggtaagtgctcagcaccagtgcaatcggaatcacagaaccgaatacgcctagcagcaatccttcaaggaaaaacggccagcggataaaccagtttgtcgcgccgacaagcttcatgatttcaatttcttttcttcttgcgaaaattgtaattttaatggtgttggaaattaagaacatcgccgtaaataccaggccgataattaacgcgattccgatgttgcgggaaacgccgaccactttaaacaaacggctgacctcttcttttccataagtgactttataaacatgatccattttttcgatctttttcgccacgttcggcgtatcatgcggatctgtcgttttgacgacaaacgcatcattaagcgggttttcctgatccttcattgtcagggattttccgctgtcaccaaaactgtcaaccagctggtcaagctctttttctttagatgaaaaagtgacactctgaatgcccttcagttccttaatatcgttctgaagcttgtcctgtgccttctgatctgcagtcagatcaaccagcactttgatttcgacttgtttttctgctttcgtggccatgttattcaaattcagcataatcactaaaaacacgccgactaaaatcagcgtaacggttacagcactaatggatgcaaatgtcatccatgtgtttctcccgagagatttaaaactctcacgcaagtggcgcccgagaattttaatcatatgaaccatactcccctcttgactcatcacgcacaatgataccatcttcgattgcaatgacacgtttcttcatggtgtttacgatttctttattatgtgtcgccatcacgactgttgtcccgcggttattaacttcctccagcgtcttcatgacttcccaggacgtatccggatcaaggtttcctgtcggttcatcagcaatgacaacatcagggttgttcacaattgatctggcaatagatacacgctgctgctccccgcctgaaagctggtcaggaaattgtcgcgctttatgcttcagctgcacgagatcaagcacttcaagcacccgtttcttaataacagacggctgttctccaatcacttcaagggcaaatgccacattttcaaaaacagtaagtttcggaagaagcttgaaatcctgaaagacaacgcctattttgcggcgcacgaaaggaatctctttttctttaattgtcgcgagatctttatgattgattaaaatttgtccttttgtcggtttttcttctctgtaaatcattttaataaaagtagatttacccgctccgctcggcccaacaacatacacaaactcaccgggatgaatggtaacagaaatcccattgagcgcttttacgccgttcggataggctttatatacttccttcatctctatcatgaaatcacctaatcttttatatcattttatctatcacacggtcatactcttcgaatgcattcgacaatttatgatccattcatttgtaaaaagatgaaaaatctgaaagttccctttttcaatacacttcattatacgtcaaatttagacataatactattacagtttcttttcattcatatttaaagaataaatattcatttgggttggaagtttcgtttattacgaaaactgtttttccatttaaatgaatcaaatccactacttgacaatcattgataaataatataaaatttcgtcaaaattacttttttgtatattaatgttaatatatccataaaaatgaacttggtatcactctcaacttgttatctcatatttacataatctaagtagacacgaactaacagaaaaacatcattaatttatttaaggggtgttataattgaagctaatttacaaggacgaatacggtcctctatattctgaaaagtcaaagaattctatccttaaagagcctacttattttgaagttgattccaaagacaacttaaatagaattgttgataaaaaaggacattacacttatcaaaacaataagcttcataagataaaacctaaaaatataggtgcatctggcagtaatagtggataccctctcattatggataaaaaaggacactccttggaatatggtagagaccttcttgaagtatcaatgagaaataaactttatattaggaccacagaaaaagaatattgttatgagtacgataccgaagttgaaccagatactattcaaatttttgatgacaaagtgcttttgaatttaaaattaagacaaatggttgtacttgtatctacttcaggtaaagttttaaatagctttggtcttgatagatacagaggtgaaggacaaaaacaattaaatgttcccatgttctctgtatatatagaagatagaaattctatattaatttcagatgccattaattcaagagtaattgaagtcgacgaaaatggaaatataatttggaaatatggaaaggatggtttattaggttcggatcaaggactcttatggaaaccaacttgcgcaagaagactttccaatgggcatactattattgcagattccaaaaataaccgattagttactatagatcaagataaaaatattgtaaatgagattgggcaaacaaatgtttctaaattgtttctcacatatcctcgctctgttcaaatgcttgataaatataattggctggtgacaaatacacacaagaattctatctttatcatgaatcaaaatcaaaagaaaatcataaaacccataaatgattcttataacaagttaaatttattttggccaagatgtagtataaaaaactcggatgatgaaataatcatagcggacggaaagaataatagaataatgtttattgacgataaaacattacaaataaaaaaagtaattgattactattatgaacaaggtaatagaatgacaattattgatcctcatgatattaaaataaaccctaaaacaaaccttcttctcattaccttatctggaaacaatagggttatagaaatgactagtgatggcgagttaattgagagctatgataatctaaacgaccctcattctgcttattacttttcaaatgggattattattgctaatacggaagacaacaacatagttatttattatttttccggcaaaaaagaaatcattaataattttaaatctactaattcatgctgtgatgcctttaagagacctcgttatgcgctaccttataaaaatggatttctaatattagatacagacaatcaaagaattatatttttaaaaaaagagaataacgaatggattggagaaaatgtgcctatctattttcctgatggacctataatgaattatctttgttttcctcggtgcattacatttaacaatgataatgaactaatcttaaccgatactgaaaattgtaggattttacgccttgtgattgacgacactcttattaaggaggagcattcaaatgaaatataaagttgattcggcacatggtggtgaaggttgggtacctagaaagcaagatcactctacagaactaggtcatttctggaataactgtggcgtaaagggcgaattcggtaccctgtcacatgttttacttagaagtccaggtctagaggtagaacaaaattttaatcctgctgatatcctatggactgagagaatagaaccatcgaaagcaagagaacagcataataatcttattgaagtttatcgctcccaaggggtagaagtagacttaattgatgataaagcagctgaatcttttccaaatattttgtatgtcagagatttgtttacaatgacagatcaaggagcaatcctatccaggatggcatcagaggttagggctggagaagaagtaattatttctaaaaaactatctgaactcggtatacctattttagcctctcttcactcggatatgatattagaaggtccagacatattaatagtcaatcctgatctagtatttataggttatggtataagaacaaattataaagcagctatgtatgtcaaacagatactattaggattgggatattccgaagttatcatcattcaaactacttatggctgcggacacttggatggtgtagtgaatattttaaattctcggtatgctgccattgttccaaaaagagtttcatatgagttgtacataggattaaagaggcatgggttttcaattattgaacttgacgacatgtatgaaatagatcagttgatgtcaattaatttcgttcagctaaacgaagagactcttctgattaataagggtgccaaaaatacagtgtctcaatatagctcatgtggctttgaatgtctagaaatagacattagtgaattaacaaaaggaggcggctcaattcattgtttaacagggattttaaggaggatttaacgagatgggcgtttctatagtaattccaattaaagttaactcaatcgatgaaatatatattgatttcatcaattacatcattgatttttcttccaatgtattaactaaagacgttgaaataataatagccaatggaagttctaaaaatatttatatatttgctaatgaacatcttaaacatttgaaaaatgttatacattttatcccacatcgttcaattagaacaggagacaacgataaactaaacgggatatactctgctttaatgtacactaagcatgataacattttattagttgatgatcactatagagtatcaagtgaaacgcttgcagatatattaaaatactatgaaaaatatgattgttttaagtttatgcctaaactacatcaatacccacattcagctttaattgatacatgtggaatgtttattgttaatgtattagatagtagaaagcaatattgcggccatttagcctttaaaaaaagtttatatagtgaatggggatttatcaatagagattctctatttgatgagtttgctatggaaaaacatttacgaaaaaagggaagcagagtcggatttataaaagatatcgctctggaagccaaacaagaaattccgtttaaaaaatttcttgagcagagagtacgttatgcttatgaaaacattgctactccctatcgctttacctttttcgccatgatcttaccacttttaatactgttaagcctgatagacacgaactatggtctgaattttgcattttttctaacaagctggacctttgtcatatcaatagtaggtcaattcatttatggtaaacaaatcaccccttggtacacttcactatatagtcctatttggttctggttttatccttttactacgtggatagcaatttacaagtaccttaccggaggaatcatgtttggcgggaataatattaggagggcaggatagatgaaaatcactcaaaagattatagggccacaaagtattgtatacttcaaaaaagataaaaatagagaatttgttgaaaaaatttccactgaacgaggagaagatgaattagttgatcaaattcacttttataaaatgttaccaaaagagattaagcctctttttccagccctatatgattatgatattaaaaacaggccgtttcgcatgtcaatggaattatgtgattttccaacattaaaagagattattttatacaatactaagcaaaacaagttgaaggaacacttatataatgttatacaggacatatttgaaaaaatacacaacttaaaacaaacacaggcaacaaaaaattatgtagaacatttgtatatagatcgttgcgtcaatagaataatagaaacaaagaaattaatgaaagaagcacaatggataaacaacgacttttacttagagggttcaattgtatccaacccaattcaaacggtttttgaaattataaataataataaggatttattaatacctgaatatctatgcactgtacatggacagctaggtccttctcacttaatgttaaacattcaaaagaagaatagttacaaactagttgatccaaagggatttcatgaatttcatgatccattgttggatattataaaaataggtaggtccttcctctatgggatggagtggttagaagatgacttgtataatattaaatattcttttaaaaatgaatatcttacaatagaagattttaatttaattaactatgatgaagtatatatgaagaagtcatttaaacctataatggatttagccataaataattacaaaaatgctgccctaagagtatatgccttaatttgctgtgatctaatagcaaatttaccttttgcatatttatcaggtggtgaaaagagagtagtagctttatataatctcatatatgctgctagtttagatttgtctcaattaaatgatgctgtaaataaggagaaacatatatatgaaagtctttcaaaataacagatataatatatttaattacaaggaaagttctatctttatagaagatagacaaccccattctgttcttacaatagcaaatttaaaaaatcaattagttgtggtgagacaaatgcgaaaaggaataaataatgaaaccgtcgaattgcccgggggacaggttgaagataatgaaaaacctatggacgcagcaaaaagagagctagaggaagaaactggactaatagcaaatcaatttattcaaataggtaatatttatcctctccctagtttaattaatcgccaaatcacatatttttatactgaaaatattgttggttataataagactattaaacaggatgaagatgaaaatatacatgtagaatatcacaaatttccaaaagtcgagtataatcttaaaacccaaaagtggagggatcaatttcttgcttatggagtatatatctgcaaattgaaaggaataatataaaaattttagaggttaaaaatggatgtccaatctatattatttgatcttgataacactttgttaaatagacaaaaaacttttgaaaattatttagattcatttatctccaagtatattttctataactccccgaccgaaaagaaagatataaaaaataaaataatagatatggataaaaagggagaaaaagataaaaaggaattgttttcagaattacaacatagattaaagtggagattaaccccttccgttgattatttagttgaagaatataaaacaatattcgcaaaaaacagtatagttatggatggaacttttgaggttctaacattttgcaagaataaaaatttaaaattagggattataactaatggagaatcattttatcagaagattaaactaaataacacaaaccttacatgtttttttgattttatcttaatctcagaggaattcggtaaagctaagcctcatcgctctatctttaaattcgctattgataagatggccattgatccacgaaaatcaattttcattggagacaatcttatttctgatatttatggtgcttctaggtttggattttatactgtttggtataatcactctaatatagtcaaacaaaatcccataactgtaaaacctaataaaattataactagtttaagtgaattgttgaaaataaaagactggtagccgaaaggagaaaaaagtgattattagtgttgattttctaaatcatttacacagtatttataataaaaataacgatctatccgaaaatgttaaaagaatattcaaagaatataaatgcagtaatatttatgaacacagtgtaagggtagcacatatggcaaaaaaattagctgtacggtttcgagccaatgaagaatcagcatatatagcagccttattacatgatattggaggtattgttcctaatggaaaaagaattgaaattgccaatatactaaaaatccctctttttcctgaagagatagagttcccactaattattcatcaaaaaatctctaaggttattgctgaaaaagtttttttaataagtgaccattctattcttaatgcgatagaatgtcatacaactttaaagtcgaaccctagtatgttggataaaattgtatttatatcagacaaaattgaatgggatcaaaagggttctcctccttacataaatagtctaatagaagccttagatgtttcaattgattgtgcttcaaatgtctatattaagtttcttatggaaaataaaaataatctaaaggttattcacccttggcttagtgactcttataactattttaaaaaataaccctcaactcaatactatatataatattatgtatttaaatccatcaaagttgtgtaaatattggcaagattctcttaagatagccttgtattttttgtttaacactcttagacctaggattaataactgaaatattaatggtctaagagtgttgattatattgaacgattaattaacatgttttatgtcggaaacaaggcattcaatttacactattatctttatttaccttattaaactaatatatattctattcccccccctgattcacatccaatcgaactaagtcttggttgaatgctttaattttattaattctttttataatgaataactataaacaatattattagtgtagaagattaaataatttcatttttattacaatatgaattaataattgtttttcaaaaaattccatgttataatttggtaaaccactgaaatttaaggagggttttatgagtaaagtatttgataaagaagaaatccttaaattgattccgtgttctgacaaaattgactatatatacttagcggggtcaataatggaaggtttcggaaatgatgcttcagatattgatgtttttgttataagtgaaaatccagatagactagcttatgaacctactaattttacaagagaagtaaacatacaagtaggagaatcattcataaaaaatattgttatagacagtattagatatgattttgagtactatcgttcttctagttttacttctttaatagaaaagttgaataatttgaattttaatacagaaaattatattccaaggtttacagcagatgaaatagatcttttacatagattaaaatttgctgagccgcttctgaataaaagtgcttttaatactattctaaacaatataaattttgaaaatttaaataattatttagtaataactaatattgagtcatatgatggacatttagaagacttacagggagctctttcttgttctgattttggtacttcatttgtgcttttaaaattattattaaaatattctcttaatgcttatttagcgaaatatggagagacaaatccaggagaaaaatggttatttagaaaattaagtagatacgccgaaaaacatggtgatcaacatttacttgataagtatcttaatttattatgttatccttttgagaaagataatatcaaacattatgctcaaaaaactattaattttactcaaccattaattatcaaagctcaaaaataaaaacggagggaagtaatcacatgatttatcaaaaaaatatgtttgtgagattccgtatcatcgatactaaaccttatcttattcttaatgacaatgcatttatcttagacgatgtaggcgttaatatttgggaatcaattgatagcaaaaaaaatattgaagaaataataaataaaatctcaaatgtttactcagtagagtctaataaaataactaaagatattaagaattatttaaaagatcttgaaaaaaacggattaattgaagtgtgtaaagaaatctcataggtagttaataatgtctggaatgggctcctttagtggaggtgagattaatgtataaaaagcctgtattaattaaggtgaagcttcctgttgcgttagagtttgtttaattactacttaactgattgacctatcttttatgaattgaggtgagattaatgtataaaaagcctgtattaattaaggtgaagcttcctgttgcgttagagtttgtttaaatctaaaaccagactaaaataattgatcaaaaaatcaaaggagcccatccctaacattattattaaatcaacaactactcataaaattttaggagtaaggtatacattatgctattagaagaagttttcacgtatatagttctttttgttatagttaaaacatgtatgtttcttataaggaaaattaggggtaatcttttatttgatgtgctaaggaatttattatttttcgtcccttttattttaccagcactttatttaggcttacctaatttaatttttcaaggttcgattaattattatttattatccattttttcatcatttttagctttaagcattaagtataaagaatttaaaccttacttcaataaaaatttttaccaaatcctcccgaaaatttcttttaaagactttttaatattggaaatatctttgataggaagcgctatttttgaagagtttttttacaggagttttgctcctcactcctcttttattgtaggcatggcattgtcaggaatcctatttagtattgctcattatatacagaactatacaagaagttttttcgatttaaagacatatattttattgtttttattaggaatggtttggtattggagttataaaaatactgggactttaattccagcaattttaggtcatttagtatataaccttcctagtatgattttcacctattttcactttaaatcatcaagatttcggtgaggaaaaagggggttataatagtgagtagaatcataattgcaactataaaaagaaattatatagtttcaaagagagtttttccttggtcttttattatagccagagttcttatgggaatctatgtttctgtatttgctttttttacttttaaatatatgtttgatggaaaaacagaaagtcattttttaaagtatagtaatgggatagactatataagctttgtagttctaggagccggtctttatacatattctatatctgtaataatgaatgtaggtagatctcttatgttagaaaatatagaaggtactttagaaagtatacttgtctcaccgtgttcacgtttagggtactttttaggagttttttttgaacaaataggtagatcaagtttagagtttctaatagttatatttttcagtttatatttaggtgccaatattgaaattgagaacactattccacttttaatagtaatcattattactacaatatctcttttcagtattggtatatttatagctactctaatgttatttctacgcgacacctatataacacagaatactttatttatagttatgggattagttagtggagtatcttttccgagggagtacttacctaatatcctctactatttatcctatttgtccccattatcttatgcactttctttattccgaggtgttatgacaggacaaaacattttaaattacacaaaggaaatcttggacatatttgtcttgagcctagcttattgtctttttggtttactttggcttaaatgtctggaaaaaaaaatattagaaaatacatttaactaagggtgatagtaaatgctaattgccaaggatattagtaaaacttatatattgaatgagagaaaaggtttttttataaaaaaaaaaacagagattaatgccttgaaaaagctgaacttaacaattaagccgggtagtattgtagggttattaggagttaatggcgcgggaaaaagcacaactattaaaatattatcgaccattctagcgccaactactggctccttgaaagttaatgaagtcgatgcattaaaatatcctgtagaagcaaaaaaattgttaaacgtaataactggtggtgaaagaaatttatattggaggttaactgctagagaaaacctcgaatactttggagcattatatggactatctaaaaaagaacttaaagactatataccatcatcacttagtttggttggattaaaagactcaaatataccagtcgagagatattcaaaagggatgaaacaaagattacaaattgctagggggctagtaaataatcctaaatatttatttttagatgaacctacattaggcttagacataaatattgcaaaagatttaaggcaatacataaaaaaattagctcaccaaaaaaacaaggggatattattaactacccactatttatctgaagttgaggagctatgcgattgggtttatataattgacaaaggaaatttgctcacagaaggcactccttcagatattgtatcaaaaataataccagaaattcaattgaaaatagaattgtcaaatctaagttgtgaattaaaaaaagaattattgtactatgttggtgcaatagatgctaaaatacattttttcaaagatcatactaattactcgattttattatcatcgaaagacgatttaacttctgatttggttaatattataacaaaatacagaacttccattctaagttttaaaaccgaagaacctaatcttgaggatgcattattaacattaacaagtaaacaaggtgattcaatttatgaattggttaaaggtaattaaagctgaaatatataaacaacataagaattcatttcattcaacaaaagcttatttttcattattaatatggccaatattaaacttaattaatgcctacttatgttacaagccttttaatttaaacgatttaaaattatatagaattaatacatctgacgaattaatatcctttttattaataggttttttcacttatatttcttttaagtcgttaatgcaaagtgctttacaaatgagttatgaaagatcaaatggaactttggaaacaatattcttatccccagcaaatcgtttatcattaatatacggaagaagcttaggatttatattcggtaatatatggatgttttttgcgtttactttttttataatgtgttatatcggatcaatacctatatataatttagtctattttccaatatgtttcattctaatcgtcatttcagcaactttatggggaggcttattaaatactatctttcttttttctcgagatgcttcgatattgtttatgattattgatgatcctatgatgttattttcaggtgtgagaattcctctaactcttttcccaatatgggcacaagtaatttcttttatatttcctctcactcatgttttagctgtagtcagagacttaatgttatttggagatatctcgttatcctcatggaatcatttattatacttattatcagaattattatttatgtatatgataactttatttttgctatcaaaagctgaaaaacatgcccgtattaatggagaattaaccttttattgaataggttaaaaaaaagtaaaaaatacttaattaaagtattttttactaaatttatttcttatagtttattttttaaactacatgttttttatacttttatttagcttgattacattgttaactaaggagaaatacctttgtctaaaggtgtttctttccttagttaacaaatcaatctccaatcatcttactttttttctgacagccatttggcaataacggcggcttccttatcatctacaagccccttcggcatattgccgcggccgtttttaataatgctttcaattttgtcttcgtcgtatttgcctccgacctcttgaagattaggccctgacacaccttctaaatccttgccgtggcagcctacgcagctttgctgatataattcttccccttcagatgcagaggcttcagtcttgctgcctgtatctgtcttctcttcttttgcatcatttgaaccgcaggcagccaaaagaactgaaagcgtaaatacaagcattagtatcgataactttgatttcatgttgagaagcacaactcctttacgatctcttccatattataacctcgtttaagcacgtttgaaaccctcgcccagcacctcacttgcatccgccacaatcacaaaagctgactcatcaatctgtttgacgatttgtttcaatttggtgaattcagtttgcccaaccacgcacattaaaatcggacggtcatcgtcagtatatccgccgactgcagagatttttgtcacgcctctgtcaatcttctgtaagacagcctccttgacagcctgctcctgctttgtaatgatgagcgccatttttgaacgattaaagccgacttgcacaacatcaatggttttgctggacacatagacgccaagcatggcatataagccttgctcaatattaaatacaatcatagccgtaacaacgatcattccgtcaatgatggcgagacacttccccaatgacagaccggagtacttatgaatgatctgtgcagccaaggctgttcctcccgtcgatcctttccctaagtacacaataccaattccgatacctatcccgacaccgccaaaaatcgccgccaggagttcatgatgagtggcgggctgaatatcccttgtcagaaacactactagcggcaaaaacacagaacctgcaagcgtctttagtccaaatttcccgccgagcaaaatgacgccagcaataaataaagggatattaataatccactgtacatacgctgcttcaaaaccatatgattgtaaaatcgtactgatcccgctgacaccgccggcggcaatcttgttcggaagcaaaaatacattaaaggacacggccgtaatcgctgctcctatcaatatgtatacataatcccgcaaaatccacaatgttttattccgtacgtccatcatatatcctccgtttcttccaatgctctccgatagcattttaatccttccctgattagatgtaaataacacccaaatacagtggtaatatgctaaagcagcagtgaaatcaaggatataaggaattaaaaaaacacacccgttgcatcaggtgtgtttttcagcttatgaaagcttagaacgcaggtaggcatcaataaacgtatcaatgtcaccatccattacagcttgaacgttccccatttctgtattggtccgatgatcttttaccatggaatacggatggaatacataagaacggatttggctgccccagccgatttctttttgttcaccgcgaatttcatccagctctgcctgctgctcttcaattctgcgctgatacagcttggccttcagcattttcatggctctttcacggtttttaatttgtgagcgctccgtttggcatgtcacaactacgttcgtcggcaagtgagtaatccgaacggctgaatccgtcgtattgacgtgctgtccgcccgcgccgcttgcacggtacgtgtcaactttaatatcctccgtacgaatatcaatatcaatttcatcgttaaattcaggcatgacttcacatgaaacgaaagatgtgtggcggcggcctgatgaatcaaatggtgagatccgcacaagacgatggacacctttttctgctttgagatacccgtaagcgttgtgtcctttgatgagcaatgtcactgacttgattccagcctcgtcacctggaaggtaatcgagtgtttctactttaaagccgcggcgctctccccatcttgtatacattctaagaagcatagagccccagtcctgtgactctgtaccgccagcaccagggtgcagttctaaaatcgcgttatttttatcatacggctcgctgagaagaagctgaagctcaaactcattgaactcttttgttaatgattttagttctttttcaagctcaagctggagatcagtgtccggctcttctttcaaaagatcatgagtcatttgtaattcttcgtgggattcattcaattttttatacgaattgacataatcctttaaaccgtttgcttcatttataaccgtttgagctttttgctgatcattccagaattccggatcagccatttgttcatctagctcagcaatgcgggcctcctttgattcgaggtcaaagagaccccctaaagtccgctaaacgagaagccatattttcgagctctgctctgatttctgataattccatttcattcacctcattaaaagatccgcaggcgcctgcacgcgccgcggtcagtaaacttgccggggcgaactattcagtacggccgcagcaatttttatattttttcccgcttccgcagtggcatggggcatttcgtccgatatcaaccactttgcgaaccggtgctttctttgcttttttgttatcgtcgccttcttgcggctgatgagctgttgtttggccttgtacaacctcttcacgctccagattgttttcaatctcagctttcatcacaaattttgcgacttcgtcctcaattgattcaatcatatgctcaaacatcgcaaagccttccatttgatactcacgaagcgggttcgtctgcgcgtaagcacgaaggtgaatcccttggcggagctgatccatcgcatcaatatgatccatccatttagaatcaacggcacgaagaacgataactttttcgaattcgcgcatttgctctttgccgaattgctcttccttctcattatattttgtgatgatgcgatccataatgagctcaagcatttcatccggttctttcccgaagatatcgctcttctcaagcgcaccttcatcaagataagttgtgttgataagatcaactagaccgtcaagcttccactcctcaggaagctcttctcttggcgtatagactgcaattgcgcgttcgagagaagacttgatcatattttcaacgatttcacgcaggttttcagagtcaatgacttcaaagcgctgcttataaatgacctcacgctgctggcggagaacatcatcatattgcagaagctgtttacgcgaatcgaagttattgccttcgacacgtttttgtgacgattcaaccgcgcgagataccattttgctttggattggagtagagtcgtccatgccgaagcggtccagcatcgccattgtccgctcagctccgaatctgcgcatcaattcatcttccatagaaagataaaattgagtaatccccgggtctccctgacgtccggaacgacctcgaagctgattgtcaatccggcgtgattcatgtcgttctgttccgacaacagcgagcccgccaagctcttttacaccttcgccaagcttaatgtccgttccgcgccccgccatgttagtcgcaatcgtaactgcgcctttttggccggcctcttcaatgatctgcgcttcacgttcatggtttttggcatttaacacttgatgcggaattcctttgtttttaagcagcttagaaatcaattcagatgtttcaacggcaaccgtaccgacgagaacaggctgtcccgtcatgtaacgctgtgcgacatcctccgcaactgccttaaactttccttccatcgtgcggtaaattaaatccggtcggtcatcacggacaacaggcctgttggtagggatcgtgacaacctgcatgttgtagatgttgcggaattcttcttcctctgtcttagctgtacccgtcataccggcaagtttttcgtacatccggaagtagttttggaatgtaatcgtcgccaaggtcatgctttcgttttgaatctcaagcccttccttcgcttcaatcgcttggtgaagcccctcactgtagcggcggcctttcatcagacgtcccgtgaaggaatcaacaataacaacctgtccgtcttccactacatagtcaacgtccttttgcatcgcaacgtgagcttttaaggcctggttgatatggtggttgagcgcgacatgcttcacatcaaagaggttatcgatgccgaatgctttttccgccttcgtcattccttcttcagtaagctgtacagcttttgttttgatatcgtacgtgtaatccttctccgcttttaacgtgcggacaaaagcatttgcctgtacgtacagcttagtggattttgcagcttgtccagaaatgataagcggtgttcttgcttcatcaattaaaatagagtcaacttcatctattaccgcaaaatgaagcgggcgctgaaccatctgctctttataaagaaccatattgtcacgcaaatagtcgaagccaagctcgttgtttgtggagtaagtaatatcagcggcataagcttcccgtttttcgtcttttgacattgagtttaaattcaaaccgacagtcaaaccgagaaactcgaaaattttccccatttgctcagcgtcacggcttgccaagtattcgttgacagtcacgacgtgtacgcctttaccggttaacgcatttaaataaacaggcagggtagacgttaatgttttcccttcccctgttttcatttccgctatatttccgtcatgaagcgccacgccccccatgagctggactttaaacggaaacatgcctgttacgcggcgtgaagcttctcgaacaacagcgaaagcttcaacaagaagatcatccgttgtcgcccctttttcaagacgctctttaaattcaattgttttatgtttcaacgcgtcgtcagagagattttcatagtctccgcgaatcgcatcaatatcgttagcaattttttcgtatctattcagcgtacgttttgttggatcaaacattttatttaaaattccaagcatttataacgctcctctatcttcacatgcctattttagaggcatgtataaataatttactagtccatgtatacctctcattatcatatcataccttttgttatttccaaagaatttgcaaataagaaaaacaaaaaccttccgcggacatcacggaaggcttctcttcattattcagtcggttcaattaagccatatttcccgtcatttctgcggtacacgacatttgtaaggtttgtttccgcatttgtgaaaacaaagaaattatggccgagcatattcatttgcaagatcgcttcttcactatccatcggctttaaattaaagcgtttctgacggacgatgtccaagctctcctcctcttctatgtcatcctgaaccgcaatatctgtatcagagccaagaccgtttgccaataaatattttggagagccctgctcacggaatttacggtttactttcgttttatgcttacggatttgacgttccagtttgtttgttgcgagatcaattgcgttgtacatatcctcgttatgcacctcggaccgaagcgccagatctgtcatcggaatcgtaacctcaaccttagactccttgtcattgtaaaacttcaagttgacgttcacatcagcatccacgctatggtcaaaatagcgctccagcttgccgatcttcctctcgacatgatcctttaacgcgggtgtcacttcaatattttctcctctgatgttatagttcatcaaagaacgcctcccttttattaaggatatgtatctatttctcttttaccctttacaattcctgctgaaacataaatcttttgtgaaaattcagtgaactttgtcgaattttgtttgtatttgctctgttattggcggttcggaggtatatgtatatgctgattgaacgaaacaaatacctcacacacgcctaattgattaaaaagggttccatacattgatgaatagacagcatccattttctataatgaatcagaaaatgttcctttaaatactcacagaactcatgagagggaaaagagaaagagaccaattgatcaaactccgcaaaaatttggtcaaatgctttcacacaaatttcagcacaccgcgaatccataatgaagagaagtgttgaatgtgttgaatccaaataaaaaaaggcttggatcagatcttggtagatccgatccccttctgtttttgataaattctcttcagcctctatcaaataacacaacccctcttcgatggtaaaaagaagatgataataagctgataaaagcgtataatcttcaatgctcttcaaggcactcacctatttacgcttgtcataatatgtgccgtcaatcgtaatgttgttataagggtttaaatacgtcgtatgcatcacacgttttcttttcatctgctgaagttctgttgcgattgactgcttcagtctttccatttccttcacaatcagctgatcccatgtcaaaataagtttcatctgctttctctcttcttctgaaagcggcagagatatctcctgaatcagttcagaccgtgtagccacaaagtcttcaatttgctttaaaagttcatcgctttccggcgtattttgtatgtgtgacagcatactcttcgtctcagtgtatagttgatctatattattcatgcgatcccgcctgatccgtgccggtccttccgttcactttgaattgcttgtttccaagcatcgcgaaaatctgttacataaccttcaacctcagccagcatgcccgtatcatttttgatatttgcctgtaccaatctgcgatacatataatcgtacatcgcacccatagaagcggaaagctctatgttacggttaagtgtaaaatttaattcctgaataatattttgcgctttaatcagattttcatttttacgttccatatcatcattctcaatggcctgagcggcaagtcttataaatttcaaacagccattatacagcataagcgtcagctcaccgggtgtagccgtattcactgaattttgctgataggctgtataaggattttggatcgccatgtgtcatcctccaaattacatttattgtgctagaagctgtgataaataggacgattgttcgttcattttttgaatcgcagaatccattgcactgaattttgaataatagcggttttctattgtggtcaaccggtcctgcattttggtaatatcagtgctgatcgtatttaaatttttaccgattgaataatcattggttcccattgtcgagttgccggcttttgcttcaatgctcttcaccgtacttttcagggtgtcaccgatgcgtttcataatccctttatcactataggcgctgctgttcgatccacttgtaaataaagcggcgacactttgcggatcttcttgtattttagctttcagtttgtcttcattaatttctagatgtcctcgcatttggtaagcaccagacgttgtgatgccaaattcagttaattgataggtttttccatccgcactaacttgagaataaaaatcagtccgcatttgattcgtaccagtgcttatgctggtatcatttttcagcaaaccgctttttgccttctcttcccagagttctatctctttatcggacatggcttctttttgttcactcgtcagcggcgcatagtctctgtatttttcttctttcaacttttcattcaggctgtcaaccagttcattgtatttattcacaaactctttaatttggttgtaaatcccgtcaacatcagtagatacagatgtggtaacagggcctgtggctgcagttgtatttttgatcgaataagtaacgccattcactgtgaagttgtttgacagcttctccatttcaaagccgttgatggtgacttttgcattcgttccttctttgtaagcagtaatcttattatcagtgtccaaagaaaaacctagctggccagacataaaatctgctgtagcagagtctgctgcttgtatactgcctcctgcacctgttgctttagaagaaaacgcaatggtttccacatactctgtaccattccaaattttatctttaaaagctgatactcctagatctgagctgttaagtttagaaatcacattatcaatcgtatcagcgctcgtcacactaatgttcactgtttttgcggctgtctcaccaggcgcaacaacgttaaatgccaaattataatcgccctgtgtgtatcctgtataattgtttgccttatatgtcgcagcagttgccaaacttgctacttcaatagtagatgaagagtttgctgcacttgcagttcctgtagcagttaacacagattcgtttgagcttgatacggttttactctgaaacgtactcggatatgtcagcttattattagacatataatcttggaattcttttattttcgagtttacttcacgatagctatcacgctgccattcaagagtctgctttttttgtgttagcttattaagcggtgctctttctgtctgcatcagctttgatacaatatcatctatatccattcctgacgccagacctgttattctcgtgaccatttcaaaccactcctaatctactttttttcatctacaaataacccaagaaattcagtcatagctgcataaaaatctagccaccgccttggcggaatttcacggatcacttcatttgtagagtcctctattacttttacatagtattcatttaacttctcatggagctcaaacttcagatgaacttgcgaaggttccaaaaacttgttcattccctctaccatttcagcaaggtcggtatatgaaacttgatgaacaggaacctcactctcatgatctttctgattatgtatttgagtatcatagcgatcccaaacaggttgtaacgtagtgagcctttcaatgttcaattgatcatcccctatgccccaatctatcgtttatatcgactaaatcgagataacattacacatatttttggaaaaaatctcatccgttttagatttcttagtttggaaatacgtttataaaaagtaagtggagaatccggttattatatcatgatttaataacagcaagtggaatgattcggagttagaaatataaataaaagaccttggcaacgccaaggtcctctctaaaattaacgtaacaattgaagcacgttttgcggctgttggttcgcttgagcaagcattgcttgagaagcttgagaaagaatgttgttctttgtgaactcgctcatttctttcgccatgtcaacgtcacggatacgagactcagcagctgttaagttttcagaagaagcactaaggttgttaattgtgtgctctaagcggttttgtaccgcaccaagttttgaacgttggcttgaaacgctagtaattgcagtatcgattttcgcgatctcagtgtcaaaactaaaagtagctgatgaaacatcgatcccttttactcctaaagttgttgcatccatgttgccaattgtaacattaatgttttgggtagcatttgcaccaatttggaatgtaaatcctgctgttacactaccgtctaaaagtttttttccgttaaattcagtacgttgagagataccatcgatctcttcagttaaagcatccatttcatctttaattgcagttaaatcttcaggttgctgtgtacctgtgttaccagcttgaacagtaagttcacgcatacgttgaaggatggcatgagtttcagtcaatgcaccctcagctgtttggataagagagattccgtcttgagagtttttagaagccatatcaagacctctgatttgtcctctcattttttcagagatcgcaagaccagctgcgtcatctcccgcacggttgatacgaagacctgaagaaagtttctccatgttcttttgtgctgcaccgttgtttgaagacaaacggttcagtgtgttaagcgctgcgatattgtggttaattctcatttttatttcctccctgaatatgttgtttaggcacgtccttgtgcctcaattttgtaatcggcgagccatttgtgccctctcccggctacatcattaatatcggattgtctctgattttgttaatacaaaaataaaaaaatcctcactttttttgtgaggataatgcggagatcacatcgctggataacgacgccgcacggttattttcttcctgaatggttaaataaatctctttccgatgaatatcaatatgctttggggcttcaattccaagcttcacttgatccccctcaaccgcaatcacttttacttcaatatcagcacctatttgaatcgcttcgcttattttccgcgataaaactagcatgattctcctccaatcggatgctttgtcgtatatgaggagtcgtgtaaaacgacttgcttagccatcatgttcttgcgattcacaataatgggagccaataaattcgcagtagacttttcaaatggctctgccatagtcaatattgtcatgacttctacgtcttgaatattatcgatatccaaaagttcagcagttgattcatcaagatcaaattcataattcttaaaaaagataaacggacttacgacgataaacgcaagattttctgaagtgacggactgcagtgccacgaatggagagtcttctgaaagcggaagtatgacaaattgtttttcttctaaaaagcctggaatcccgctttcaaaaagaatgatttgttcttcttttatgttcatttggccatggtacttcgtatgaatgatcattgttcacgatccttttctttttacttttcgggtgattctttcgggtattctacatctatatttaaatcagggtattggagcatgtcaaccttaacatttcctggcgtatattcaacaattggcttatgcggctcagcctgaataacaggctttcgcggcgtaatctgaacatcaagctgtgacggagtatattgtattttcaccctagatagagaaggagcataattttcgcctaattgaatttggtgcatttcagagttcctccttgcttgtgaagcgattgggttccccttattttcaatcctcataagctcgtcgccttcttctgcagtacgcgctattccctccattacatcctcatgcccttgttgtgcggcttcttcaattctcttgaaaacatgctttctgtctaattcttcccatgcttgtgtctggtcaatcgtgagttttccaggtgtcaccgatatttccatttccgcactcggctgttcgatctctagatcagcttgaggctgctccatttttaagctggcaggcgtcgttgttaaaccaatttttccttgaacactatgcataatcaatctgggaatctgcatcactctacctcctgaactataaaaaaagcgaactcctgagagccgcttactttaaaaagtcaattaatgtaggctgaacaatttgcgcattaacggccagagtagccctgtgcacactttgctgcgcaataaattcagttattacttcttccagttctacatcttcattgtctgataacactttggtagctgtttcttcttgcgctgacagtcttgtattaaccaattcaagacgattatatctcgctccaagatcagatcgttcagcactcatgccgtcagaaaaatgatcaatatcatctaaaacactgtccatgccatctagcgaaccagaatttagtgctttctcaaaagaatcaagcatttcaaatacattctgcccgctttcagaagtgcctccaaaagctgactttggatctgaattcactttcaatgacatattatttgatatattgactacgacatcagctgtatcagaaattgtataagttccgtctccgttatctgtaaccggaggcttatctgaatttgtgccattaaagatatatctgccgttcacttgtgtattcgcaatatttaaaagctgttcctttaactgctttacctctacgccaatcgcttgccgctccgactcgccgtttgtatcattttgagcttcaaccgctaattctctgacctttgacaagatgtcaattccttctgtaatgtttgtttctgtgttttcgagccaggtaaaggcttgagaagcattgcttttgtactgctgcacttgagacagttgcgtattatactttaagcttttcattgctactacaggatcgtcggaagcttttgagatttttttccctgaagaaatctgcgactggagtttatccagcttcgagtagctcgaaccgatatatctcagtgagttttgctgtatcatgccttgtgttactctcatgtgactctacctaccttcctccaacacccatgccgttgatcactttatcaagtaattcgtcttgtaaagtcaccattcttgcagctgcattgtatgcatgttggaattgaatcatattcgtcatttcttcgtctaaagaaactgcgctcatttgctgacggtttatgtcagcatcatttagctgtgtttctgtattagacgccagtcgattagcctcttgagcttcgatccctagctcgccaatcagacccgcataataatctaaaacactagtttctttaccgttaatggttattttaccggttaaaacatttgctaattttgtagcatttgcgttatcgttggctgcaccagtcagtgagaaagcaatgtttgcgccttttgaatctattatgctgtcagccactttgatcttgcccgccgcgcccttggcaggttcagtttcaccgccagtaaaatcaaaaaagtctccgccttgttcaccgctcttggtcacaccatttctgtgcacttcattgaaagctttcgcgaattcaagcgccatattgtcaagatcagaaagcatttccgggtatacgcccttttcttggccgtctgctgttatatacccgtaagactctataaatcctaaaagggatcccttgctgctaaaggactccgcctgcacagctgtatccccgattgaaatacttgatactaacccagtttcattatcatagttggctgcaagttctgaaacctcgtaatttttaccgtccaaaacagttcctagcgactgtttatttttatcaaggatttcaattgatacagttccttcagcagatgcaagtgcattcccgcctgatttgttgtagttgactttgatatcaaccattgaggataatttatcgatcagcaaatctcgctggtcatataaaccattcggaagaagcccgaccggctctacttgtgcaatttgcttatttaaactgtttaattgagaaagcagagaattgacatccaacacagttgtatttagctctgcttttaaattcgattggacatttgtaagtgattcagaaatataattaaacgtttcagctacagcttgtccttttcgagcaacaacagaacgtgcactttcttcatttgtattattcgataattcctgcagagaattccaaaacgaattgagcacactgttcaagccgctgtcatccgtttcatttaaaacgccttccatttgggacagcgctttggccttcgtgtcatagtatccggcactgttgttttgaagacggtattggtagtcaagaaagatatctcttattctctcaactgattttccttgaacgcccgtacccatttgtcccgctgttttttctgcgtttttagatacagcagggaaatagtcagttgcttccaatgagacccgctgtcttgtataaccatcagtattggcatttgccacgttatttgcagtcgtgcttaacgctgcctgctgagcgcttaacgcccgccttgcagtttcaagccccataaaggtagatgtcattttctgaattcctttctgctaagcttttgaatcaaacagtttcattttgctgcttttcggcagctcagctttaattgatttgctgtaattgaagttattttccttaggaaccagcatatcgtacgaaatagagatgaattgcagcgcgtctcttgtcagctgcctattcatctcatttacttttttcagacgtccgagaacttgagaaagagattcgtatagttgttccagctcttccttttcactgcctgaggttttggtgatacatgcggaaatagtattattttcgctatatccgagaaaggccgaagttgttttgatccggtcatcttctgtctgcgtgattgcttgaatatatttttgctcttttgtcaaaatgttagaaagctcttttgttttgccggctttgagcgcttccgtcttttcttcagacagcgtgagcaggtgctcatgcagaacgcaaagtcgcttcaattgttcaataattgccttcgctgacatgggctttctccttttttattgctttttataaaaattaatcatatttttcgcgatatgatttgcgtctactttgtatgacccgttttcaatttgcgctttaagctgcgcaattttttcctgtcgtgaaccagtgactgcgtcggatgcatgttgcatttctttagcctgtgatgaaatttcaattttatcttgaggctgtgcagcagttttttgcaccgcttgcttatcataatttttttgatatggattaacggattgtgttccaaattgattgattttcataggattcctctcgctttccgttgcagtctttaaacaatcttaacccttttatcgactgcgttttcagttagtttagggaatcagctgtttttggtattataggcatagtatgtgtcttttttactattttctttctcgattttcagagcatcctcgtggttcaaatgatccatttgatccttaatatcggactggcaagccttgcagaatttgccttctctaatcgatgtcccgcacctttcacaagggtatgccaaattaggaagatgagtgatctgaattcgcttctgcctgatgaatttcaatatcagctcttcttccacacctgtttcctcagttatccggctcaaagttgattgccggttttcctgttttcttaaaaatttatagacagtctcaaatgatttttcttcttccttaatacacgcctgacatacggtttgcagctttgtttttaaaaataaagcattgcatttcggacaattagccagttctcccatcttttttctccttattagataatatgcctgtgtcaatttctagtgattatatcggcataaaaacagaatcatttagcttctgatcaaggtaaaagatgacactgaagcggcttttcctttttctaataagcagcgggctgcgaagtgcaaggtggcgcctgttgtataaagatcgtctattaaaatgatattcatacctgctgctgaattattttttgtatcaaaaatgcgctctgacagcaggcgttctgttttctttttctttgactgcttctcattattcaggcgaatgaggggatggtgggaaggccgatctaaacattctgccaagagctgtgcctggttaaaaccgcgctcttcttcccgttccttgctcagcggaataggtacaagaacaaaatgcttatcggggtaagccttagaaaaggttgaagaaaaatcacttttaaatgcatttatgatttctgcatctcctctaaatttaaaacgggagagcgcttctttcatcatatcattatatgtgtaaactgaacggttttgacgcaatagcaaactgtctctgatccttgttctccacacctcgcaatccctgcatacggcatgaacagattgaggtctgccgcacagggggcagatatgtcctgtgattttctttaatttgcttctgcaagaataacaaaccttttcatcaggctttagtaaaaaaagggctctccatgtaacatcttgagaaaattgcgaatcacataataaacagatcagtttatgaatgcctcctcctgcttcgtttgacataaatcgcttggactctctgaaactactgcagcagattcagccaaaatgacaagcattgctgtgtttttttgtttatctaccagctcagctttcgtatatgcgatctttttaagatcagtaacgtaggatggactcactttgtttaaagaaagtgccaatacatcgttttggcatacttggcaagtacaggccatatgaagctggtccatatatcggtcgagcagttctttcattacgatttcttttgaattgacaagcatttttacagctcctcatcatcggttatatgagtatactgtaccacgttttcaaataatggctagtctgtacattcaacttttgctgccaattcattcatttcttttatatgctttcttgcatcgagcatactctttgttttgccgaagtgaaagtaaatgacatcgccgtccgcatattctttatgccggccggttcttcctgcaatttgaacaagtgcgctttccgtaaagatagacgattccgctcctagtacacccgtttgcaccttggggactgtgacgcctctttccagtattgttgttgtgattaatagatcgagctgaccatctctgaattgctgcactttctcctttctatgcttgtcttccgcgtgcacagatgcggttcggcaatgaacacctttaaagcacgcagcagccttttccagaatagaaacggaaggaacgaataaaaaaacaggcctcccttcttttacatgaaactctatccatcttttcaccgctggcggaattttatttcggtttaatttcttcttccagtttccacaccatacaaagcgcggttcgggtaaaggtttccggtggtgtcttgcggggatgcgaactgaatgtaactgtccgttcagtgcttttctttttaattctttaggaggtgttgcacttaaataaacgagggtgctgtttttctttcttgctttttgaacagcgaattgaagggtttgatcagcagaatatggaaaagcgtcaacttcatcaatgatcataacatcgattgcatctttatatcgcaaaagctgatgcgtagtggaaatcataagcggagatagccgccctttgtcatcgcttcctccgtaaagcgctgaaatgtcagcaccctgaaaggcagccttgagtcttggagcaagctctaatacaacatcggtgcgaggtgttgcaatacatacacgcagtccttgatttaacgctgattctataccaggaaacagcatttctgttttgccagcgccgcaaaccgcccagatgaggagctcttctttttttgatattgcttcaattaaaacattggcggctttttgctgtccgcttgaaagcttgccatcccatgtcagcttaatagacttccagtttgattcattttcctctttccatgaatataaaggaacctcctcactcactctgcccatcatgacacaggaacggcaatacagcttattctttccagatgagtgataaaaagaaaaataccgctgatcagtttgtccgcacctattacatctatatctccgtttatttatggatatagaattttcagcagtgatatatccattcttgatatgccattcaatcatctcatcggaaaatgagagctcagtcctgagcaaatgacggcttcgaagcgtctgctgcaattcttttgaaaaggaactgtttttttcaactggcacattcacatagcacgcctcctttcgaaacagtatgcctgaatgaatattttctgtccaactattaaaataagaatataaaaaaatctccgctctaaaaacggagatttggccttatttaaaacaccagcaaattcctaacgcaccttcacccaaatgagtgccgattaccgcgccaaaatagctgttataaaattcaacatgaggatattttgcagaaagctcttcaatgattttcgctgcttcttcctctcgattagcgtggataacagcagctcgcataggcaaccctttactcgcatcttcgtctaaaagctcataaattcgcgaaattgcttttttacgtgtgcgaatcttctcaaaaggcacaattaccttattgtcaaaatgaaggataggctttacctttagaagactaccaatgaaggcttgggcgctgcttaatcgcccgccgcgctgaagatgggctaagtcatctaccataaaataagctcgaactgtttttttcatttcttccagttcttttataatatcttccggcgatgatgctccgtttttgattaattcagcagctttaagggcataaaagccttgagccaagcagctgatctctgagtcaaatggatacacatcaatattgtcgaccatcgaatcagccgctgctgcactgctgaatgttccgctgatcccgctggaaagatggatactgataaccgcatcataagacttgccaagctcttcatacaacgcaaccagctcgccgattggcggctgagaagtcgtcgggagctcattatgttttttcacttcttcataaaagcttttccagtccaactcaatttcttcacggtaagtctcctccctaaaaacaacctggagagggatcatatgtatctgatgttgttcacgcatttctttcggaatatatgccgtgctgtctgttacgactgcaatattcatagcttcgatacctgccttattgctttataactctattgtaagggaaacggcagcctaaaaaaagacctgcctagtaaaaggcaagtctcctattatactatctcatttctacccagccatttttaatggcgaccacaacggcttgcgtccggtcgtttacattcattttttgtaaaatattgctgacatggtttttaacggttttctcactgataaacaatgattcaccaataccgcggttgctttttccgtctgcaagcatctgcagcacttcacattcccgcctagttaaaatatgtaatggtctgcggatttcagggtaaacctcatgttgagggtgtgcagaaactccgcttgttgcaaggcggcggaattcgttaacgaggttgtgagtaaccttcggatggaggtaagatccgccctcagccactactttaaccgcttcaattaatgtatcagcatccatctctttcagcagataacctcttgcacctgttttcagggcatgtgttacataattttcgtcatcgtgaattgatagaataattactttagattcaggatacagctctacaagctgttttgtagcttccacaccatttacgtttggcatattgatatccatgatcacaacatcaggatgatagtgctcaacaatacgagccgcttcgtctccgtcatcaccttcggctaccacttcaaaggtaggttcaaaatccaatatccgtttaacaccttcacgaaataactgatggtcgtcgataataacaatgtttactttagtcacaagccacgcctccttgtattattgttctatatactctagcattcggtcaatatgccttttggctctattttacaaatcatagtcaaagagataacggaaccttaatcataataaatgtcccaagacctattttcgaatctattgtcatcgttccttccaataaatctactctttctttcatgcccagcaagccgaatgatttgtttttcttctctttcgcttccttcaggtcgaaccctttaccgttatcttttatcattaaaatcacaaaatcctttgtgatctcaactttgactgtaatttcttcagattcagaatgctttagcgcattagacacagcttcctgtgcgagcctgaagagcgcaacctcaaactgaggcgctagcctctgatcctctgtttctccaatgcactgaaaatgtattttgaccttcccgttatattcctcggttgtatatagatattttcttaaagttggaatcaggcctaggtcatcaagggccatcggtcttaaatcatatataatccttctcacttcgtaaagggcattccgaacattttggcggagatttttaatttcttggaatccgtcctctgcgccccggtcacggaaaatccgctcgattaattccgatctcatcataacattcgccagcatttgagcgggtccgtcatggatttctcttgagactctttttcgctcttcttcctgcgcctcaataattcttaagccgaaatcctgttttgcctgagcatcagcaagaagcagtccaacttcgcgcaaatcctgattcaagtagttgagcacaactgtaatttggcttactaatgattctgaccgctcaatgatttcctgaagccctagcaatctgcgctccaaatcgtcccgccgttcgcgcaattgcttctcacgctgctggatcatcgtcaattctacctgcagcttatgggctttttcataagcattgcggatttcctcttcactgaatctatgaaaattacggctgacctcggataaacggtttctcgcatggcgggtttgcacttcaagtttatcgccaagctcaatcacttcatacacctgctgtttaatttgtttcagttcttcgaccagctgttcatactgctggcgtgactgctccccgatttgaaaaacctcgtccttgctcccgtcaacggttttcagcatcttcatcaaaatagaatccagcactttggaatccatctttgttttattcataatttccctccgtcacggcgttgtcatatatttttattataaatgtaattgatctgcaaattatgtcgaattataatgaaagaatgcgtatattctagaaaaaaacatttttatatactatctactctttatgataccaaaatacgcacaaaaattctaaagactgtacgaatttgtataggcagtcttttatgcttagcaggagggtcagctagcatgctgcacagctattttactgtgaaagaagcaggagaacacgagattgttatagaaaaatcgcgttttatctgtcatttaagccgtgtttctaccgaacaagaggcacaggaatttatacagaaaataaagaaacagcactggaatgcgactcataattgctcggcttatgttattggcgagaatgatcatatccaaaaagccaatgatgacggggaaccaagcggtacagcgggagtgccgatgctcgaggttttaaaaaaacgcagactgaaggatacttgcgccgtcgttacacgctacttcggaggcattaagcttggtgctggcggattaatacgcgcttatgggaaatcagtgtctgaaggattaaatcatataggtgttgtagaacggaagcttatgcgaatcatgcatacttctgcagattacacatggcttggcaagattgaaaatgaattaagggagtcacaatttctgttaaaggaaatccattattcagaaaatgttgaattcgaaacatacgtggaagaaaaggaaacaaatgctttttctgaatggatgacagaactgacaaatggaaagagtgatattaaagagggagagttgacgtatcttgaaaaagccgtcaatcacataaaggagactgaataatggctgaacgcgttagagtgcgtgtgcgaaaaaagaaaaagagcaaacgcaggaaaattataaaaagaataatgttattgttcgtcctcgcattattagtagttgtggggcttggcgggtataaactttataaaaccattaacgctgcggatgaatcgtacgatgccctatcccgcgggaataaatcaaatcttcgcaacgaagttgtcgacatgaagaaaaaaccgttttctattttatttatgggaatagaggattacgcgactaaaggacaaaaagggagatcagactctcttattgttgttaccctggatcccaaaaataaaaccatgaaaatgctgagcattccgcgtgacacacgtgtgcaattagctggtgacacaacgggaagcaagacgaagattaatgccgcttacagcaaaggcggtaaagatgagacagttgaaactgttgaaaacttcttgcaaatcccgattgataaatatgtcacagttgattttgacggatttaaagatgtgattaatgaagtcggcggtattgatgttgacgtgcctttcgatttcgatgaaaaaagtgatgtagacgaaagcaaacggatttacttcaaaaaaggcgtgatgcatttgaacggcgaagaagccttagcatatgcccggatgagaaaacaggataaacgcggagactttggccgtaatgacagacaaaaacaaatcttaaacgcgctgattgaccgcatgtcaagtgcaagcaacattgctaaaattgataaaatcgcagaaaaagccagcgaaaacgttgaaaccaatattcgcattactgaaggtttagcacttcagcagatttacagcggctttaccagcaaaaaaatcgacacattgagcattacaggttctgatttgtatttagggcctaacaacacatattactttgaacctgatgctacaaatctcgagaaagtcagaaaaacgcttcaagagcatttagattatactcctgatacaagcactggcactttcggtaccgaaagttcaacagacgggactgacagctcaagcagttctggcagcactggcacaacaactgacgggacgacgagcggaagcagctattcgaatgacagcagcacaagctcaaacaacagtacaacgaattcaacaactgattcatcctattaaaaaatgcccggtccttttaaaggatcgggcatttttgcgcagaaaaaaactccggcacataagccggagtttttaattccttttcaccagccgtttataaaactttgtaaacggcttaaatttttcattcacgagtcctgtcacttctgctatgatttgcataaaaataatcaaaatgaagataataaacaaagaaagccaaattgtggcacttttaagtacaatcgcactgatactgaaaataaatccaattaaataaataactaagaccgacatccgatgtgaaaggccaaaggccatcagtctatggtgaatatgcgacttatccggcgctgaaatcggctgtttgtttaatattcttctgatgatagcaaatgttgtatcaaaaatcggtacgcctaatataataatcgggataacgatactgaacaatgtgacacttttatacaggcctaataatgaaagaatcgaaatactataccctaaaaacagtgatcccgtatctcccataaagatttttgccggatggaagttgtaaaacaaaaaccccagcgtgctggcaataacgactaatgagagtgacagaatgagcacttttccgccggatagcgccatgacagcaatcgttgacaggccgataacagaaagaccggcagcaaggccatccaatccatcaatcaggttaattgcgttcgtgatgccgacaatccataataccgtcagcggataagccatccatcctaactcaaatcgttctgttaaaaaaggtactgagaaaaagtccatttttaagccagtgcttacaatcataatggctacacctaattgaatcaaaaacttaacttttgcacttaattgatatttatcgtcaagaatacctaacacaataatgatgaatgctccgactgtaattgccgtcatccttgtttctgtgtaaataccggatgcaagcacgcctgcaaccaccccgataaatatggccagcccgcccatgcggggcatgattttgtcatgtacttttcgattgctgggctggtcaactgcacctattttaatcgcaatcctttttacgattggggttatgattaaaactgtcagcagcgagacaataaacgcaacaacaatgcgaatcatgcgttcgtcaagcataaagaagtctcctttggaattaaatgaagtctttatttatatagagaaccgttccttccattataccttctccttagttattataacaagcttcatcaaaaagaaacacgtataatcaaaaaacgcgcatcccaatttataggactacgcatgtttttgaatccctgtatacttcataatttgtctaaataagcaattccaatcttgtgtgcgagcgatgtttcggcgcatttctttataggtttcgtctccgttttgtccgagaactttttcacaagctgctataaaatcaattggatgatcaccttctacatattcgtatacatacggcttttgcatttttgaggttgacggaagattagtgcctacaacaggttttcctgccgctaaaaattcaaatagtttcagcggaaacacagcttgattatacggtgattgtttatatggcatgatgccaatgtcgataagctccatataatgaggcacttcttttggatctgccggaccggtccatatgacatttggaagcctcagcagctcttgaaacgaaacgtcaccattggtggcatccgggccaacccataaaaatgtccaatcaggcttttgcagggcggcggctttaatcattttaaaatcgagcttcggtttaatcccgccaataaaacctaacactgttccttctctcccctgcagtatactgcgatcgggagcttgtttatttgcagaaaacagctcatactccacaccgttttccacagtatgaaccttttctcgtcctgcagtcagttttttgtctacttccttgtgaagataatctgatgaacaggttattgaatctgctcgttgtataattctcagctctgccgatttaatgacttttcgccggaattcagacagcagatttgatcggccgctgatcggcgccgcccataagtcactgcagtcataaatgacctgatcccaaggatacagcgaagacagcagcgggaatccgggaaacgtgtaccataaacagcaacgttcaccgtttgcagaagcaggtgtaagctcatcgagtaatggggagagcttatgtctgtaaaagacatctgtatatcgtccgaaacgaaacatttttttctgcagcaggtctttgacaacgaattgcctgatgccagaatggacttcttgaaattctttaccttgggcacgcggagccggacatacccaaataacttccttcgtttcctcctgagcagctaaaaattctgccagccggtgccttctgtatctcaattggtcttttccccattcagcagtggcaacgatgacatgaatgattgcttcttttgtttccaccttcatcaccttttctctctgtttgcggctataatctttttttcaccgcgttttttgcatattgaacaaaacaccatgttgctttcataaaatgaagccgttcgatctccctgtagacaaaccacgtttttttcgcagccttccatttgttgctggaaattgagttattgacaagccgatattcagccaggcattcattcattccataggcaataaatcctttttttaaaagagacagccatgtggctaagtcctgtctcgttctgatattcggcatttggatctgtcccgtttgctccctgtcaatcatcaccgtcaagcagccgataattgtatttttcagggcgtcatcgtacgtcaggctttccggcgcatgaataaatttatcgagtggggtcccgtcctgcgccattaagctgtagcccgtgaaagaaaacgcacaggagcgctccatcataaactcaagctgcttttccagtttgtcttttttccatttgtcatcactgtccaaaaatgctacgtagcgcccttgagcgcgttccaacgctttgttgcgagcaaccgcagctccggagttctcttccaaatacaccacatgaattctttcgtctattttttcatactgctgtaaaatgtcgcgggtcccatccgttgagcaatcatccacgataatcatttcccaatgaggatggctctgatctaataccgaatgaaccgtgtcttcaatatagtcacgcgcattataggaaggtgtaatgacagatacgagaggtttccaattggtcatgatcacatctccatcgtatgattttaaaaggattccctgaaaaattcaggaatgacaacgaacataaaggcaatcgtaaggccaatcataacgccgagaactgctttctttttcggagacattccgccgcctgctgtctcacttacggtttcggaatcagtaacacttgccgctttcaggttaagctgtgtgtttttgagctcatacaaaaatctctctttatccactttggaatcctcgcttaccgactcgccttcaagcgcgtctatgctgctgcggatgacggcttctctttctgcatacagcttttgatcgtttttgaggaaggtggaggaaatggcttttaagacagattccgttttatccttatcctcgtcgctatagcttaaagtcagtaacgatttggattccgttttgattgtaagcttctctttgatctctgctacatcttcatccttttcatcaggaagcgcctccttcaaaaaggagtcgctctttaatagaagcggaatctcttctgtgctgttataaaccggatgatcatagctccccacagccaaagtatcttcagctgtatagctcttttgatcagcgatctgtgacggcaggatataccccgccgcacctaatataattggcaccgctatgatccaaatgatatttttttttatgcgacgggctattcttatcaatatatcgttcatataagtctccctgctttttgtagtctgttttatctgtacatcggctcaggcatttgtctggatcgccttaacacattcacggccgcgatgacgagcgccataaacacccaatggaaaaataaatttgaaacagagcttgggctgatacttgataccaggaaactgaccatagcggtaataagtccttctgtgatcagttttgactgattttctaattttctttcataaaacttgtaaagcacccatatgaggtaggcataaacggacagatatcccagcatgatgaacaagccaaaattagcaagaatttcaacaagccagttatgcacctctgccacattgtcagtatcatatacagcataatgctcaagataataggatacatttcctgccccgactccgaatccgtatgaatcaaggaaaaaatgccaagcgtttttcagcagatttgcccgagccacatttgatggaagcctgtcatgaaatgaatgcagcgtctgcggggccagaaacagctcccaaaactttgaatagattttgctggcgaaaagaactgcgaaaagagcaattcccgccgccgacagccatatagccattctctttaaaacaggcggcaatacaatgaagatgtagacagcaatacctgcaaaaatgcccagaaggctggctcttgaaccagtggcaaaaattaaatacaacgcacagagcgagagcacaaggccaattgccttgatgtatccattcttaatgtttttcatcatcgtgatgtaaaaaaagaagctgatggataaaaaggtcgcaaagtcattttgattaaaaaagaccgatgtcggataatgctgcttgtactccggtccgctgtacaatgtggaactcgcaagatgatggtgggtgatatgattgtaaaaaccaatgatcatcagaaataccgtcatcaccagccaaatggcataaacaatcatcagccgctccattttttgcacgtacatgacaataagataaatgaagaagattcccattgccaataaggctaaatacttgaggccaactgttaccgacttggcccacagcagagaaacaaggccatatataaaccaaaaggcgaaaaagagtaaaatcccttttacttgcagcccatgccatctttcaatatgggttcgattccgaaccatgccgaaaatatgaaggcaacccgctgcaatgagcagaagccggtaaaggaacaaactgaaaaatccaagatgaatagcgaaaaatgcattatttaaaaaagtgcaggcgatcaaaatatagattacagccataaagagccgttcttttgttgtaaatgcggttgcaagcgtcagtaaaaacaggccaattgccaacaccgcaagcacaacagccatctgcatgaaacctatatctttatggatggctcccagcaataggacgactccaaatatagcagcggccagtaacgctagcgtatggaccgctgatcgtttgatactcacatgtttaacccctttcctgatgtttcaggagccggcggccgagcctagcagccggcagcttcaaccaagtaacactttttctttttataaattgacgcttcccaagtctttagccaattcttcaagcggcaagcccggaaaatacttgtcagagggttccgttccccgaacagcgggacggccgatagagtgataaatgtatccggctgcctgcatctcttcaagtgaaaataaatttctgccgtcgatgatgactggctgttttaagaggttttttacttttacaagctccatttcttttacttccggccaatccgttaaaatcaggcatgcatcagtgtcttcaatcgcagcatacacatctgtgtaatactcgacctgttcgccaaggatcgctgaagcttcaggaatagcaatcggatcgtatgcttttacatgggcgcccagctgctgcagcattgggataatatcaagcgctggagcggatctcacatcgttcgtattcggtttgaaggctaatcccaggactgaaatggttctccctttgacgcttcccataacagtcaaaagtttatctacaatatgaacacgctgcttttcgttcgtttcaatgacagcttcgatgagcttgaatggatagcctgccgattttgcgatttgaagcagcgcggttgtatcctttggaaaacatgaaccgccgaatccaatacccgctttaaggaactttctgccgatacggctgtcaagaccaacaccatcagcaacttttgaaacgtctgcgccaactcgctcacaaatgtttgcgatatcgttgataaaggaaatctttgtcgccagaaatgcattcgcggcgtatttaatcatttctgcactttctaggtttgttttaatgacaggagcatggaatggctgatgaagttcctcaatgatggcagcggctttatgacttgttgaaccaatcacggcacgctccatattcatcgtgtcatgaatcgctgacccttcccgaaggaattcagggttagatacaacatcaaatgagtatctcccctttgaggctttttgaacgatagattgcaccagtttccctgttccaaccgggactgtgcttttatttacgatcactttgtagccgttaagatgctcaccgattgttttcgccgccgctttgacgtacgttaaatcagcttcacctgttttggacataggcgttccgactgcaatataaataatatctgaggcccgaatggcggacgggatatcgttcgtaaaggtcaggcgctgatccagcacatttttttcaactaagtctgcaagccctggttcatagattgggattaccccatttttcagacttctgatttttgattcatcgatatcacagcaaacaactttattgccgatctccgcaaagcaagtgcctgatacgagtcctacataacctgttccaatgacagctatttttttcacagcgctcatccctctcctgtaaaatgatcttcctatttatattggtcgcagtttcttacgattaaacggacgttttcgtgaccgtctgatactgatgatgcaaggccttggcgttttttcctgcgtcaaattgagcctgcacggtttcatacaagtcatctgctacttccggcttccatatttgctcatgttcgtaccgagtgatcgcttctgccaaggcttgagcggatttcggtttaatcagcagatgttggtgctttccgaacaaagacgacactccgccaacatccgtacagataacaggaacccttagcgccagcgcctcaatcacaacagtcggcatcccctcactgtaagaaggaagcacgaatagatctgccgcaagtaaatagtctcttacatgatgattcggcacttggcctgtgacgatatgccccttctgcgtcagcgtcgattttgcgggaccatccccgacaaagactgcctgaggtgggtcctgcagcgattcgatcgcttcagacagttcaaaaatgcctttctctctgaccagccggccgacatagacagccagacgctgatcaagcgggagtccgagtctttctctgatttcctctttcgtctcctcattctcctgaaaacggctgagctgtatgccaattggcaaaaccgagctgtcaaagcccgaaagctttttggcttcttcctgaagcttgtggctgactgctaaaacaactgacgcagaacctacggcacgcttgaaggctttaaacgctcctttgctgtaatgcggatagacattcacatcactgccatgcaaggtcaggacataaggaatttgcgctgactctgacacgactgccgcagccccgcccgatggcatggcaaaatgagcatggatcagatccggatataggccgcgctgtttcatggtttttaaaacggctgatgcgattctccgatgaggctgcgcccacttcagctggccgggaactgcccgatagaaaggccggtaaaccggtatcccctttctaacctcatactccggtctggcatccttttttcgatatgtctttttcagcatgcggacaggcgctgaatgaaaaggccgtgggcatatcacagtgatatcaagcccgagtttttgcagctcttgcacctgtgtctcatgaaacacaccctctccgggtttcatactgctcggatatacgcttgtgatccacaaaatcttcatgacaaacgtccttttcttagtagtttgcttttcgtttgagggtacgcttttaccaaaagaaagagatagcacagcgccccggccgcaactgaaatggccagccgcatttctgcctgcatactgaagtgttcggtactgaggcttacaccaaacgcgatgatgcccatcgccgcagtaatcagaaatggcttcataatcgactggaaataagctgaaaggttaagcttgatgacatatgccaaaagccagcgcccaatcaggaaattaacaacgctgataatggcatacacccatgcgactgtcagcaggcttcccgtctgtacagctgcaaacagtgataatccgtacagcagcagcacgccggaatcccaataaaacgctaagtcagctcttcctttagccagcagcacagatccatttggattcataagcactcttagtattccgacaatcgccagaacatttaggatcggaacagcagcaagccacttttctccgaaaaccgctgtgataaaggcgtctgacacagacacgagcccgattaaaagcggaaacgagacaagcgccagcatttttgtcatattcagaaagccttctctgatcacgctgttttcatatttgttttttgcgaaaacagggaatgccacccgtgtgacaatcggattgatcttcaaaaccggaatggtgacaatctgataagcgaggttataaatccccaatgcttcagcaccaataaaccggccgatcaaaatcatatcgatatttgctcccagcctgttcacaagacgggatgaaagctgaaatgctccaaaagaaaagaaatccttcatgcctctcaaatcaaaaacaaaagcaggatgccaattttttcggtatactgcccaatataaaatccctttactggactgcagcaggacttgagaaatcacgtacgccaaaatcgcatccatcataaaaaccgctatcgctaaatatccgaatgacaatacatttgaaaaaatctctattttgcttaacgtattaaaatgcagctgcttttgcagcatatactgatattgctgtccaattggcgcgatcaaaaacataatcgccagaatccgaactagaaacaccagctcttctctttgataaaatcccgcaatgacaggactgctcacatataaaagaacaaacagcaaaacgcccgtcataatgttaagccaatacaatgttgacagctggcgctccgtcgcgtcgtctctctgaattaatgctgctccaaaacccatatcgagcacaatctgggcgaaaactgtaaccgttgtgatcatgccgacaagcccaaattctgttaaggtcatcatatttccaagcagggcaaactgaacaatttgtatgattgtaatacacatggttgaaatacttgtccactttgcaccgctcatgatttgttttgtaatacttggcatcatattccctacttctttttaagctcagattgatggtgaataatggcattccgttttatcttgcaccatcacccgtccaaactactttacaagtttttaacataatttttaattctaaagtgaaagtcagattgcgaatgtaatataaatcaaatatcagcttttccttcggcgtcatatcgtaaccgccgttcacttgagcccagccgctcaatcccggtttaacagccagacgctgtgtaaagcctggaatctcattctggaatttttccgtaaatacgggccgttccggacgagggccaatcatactcatatcgcctttcagcacattaaacagctgaggaagctcgtcaattctcgttcttctgataaaagctccgatccttgtcactcgcggatcttgcttctgtgcccaaaccgccccagacttctcggcatctattttcatggaacgaagcttataaagcttaaatggtttcccgcctttccctacgcgttcctgcgtataaatggcaggtcccggcgtctccaaacaaatcaaaattgaaaataccgcaatcattggcagcgcaatcgccaacccaatgagcgcaaaccaaatatccattacgcgctttattgccaaataacgagccgtcttttcagataatgtaaaagaatgtatttgctgaactgagaattcacgactcacattcatgcttttctctgcactcactgacacacacctcacgatttgtttgggatgttatgatgacctatgccagtcagtttagcagacggatgttaattggatgtaaatggtatgttaagaagtgtgaattacgtgttttttctgataaatgttgttaatactcttttactattttatatacaagtcctatttgttttaatcatttcatataaaaaagagacaaatctgtgattagatttgtctctttcgattatctgtaataagatactgtgccgtcatgaatagcttgtgcagctttatctttataaaccgcttgcttcaatttacttgcatctgatgcattagtgataaaggcagtttcaactaaaacactcggcattttagaatatttaataacatagaaagcggctgtttttactccccggtctctcgttccaagattagccgctaactttggttgaatttgttcagccagtctcttgctatttgcagcttgatatgttgtatcgtagtacgtctcacttccatttggtgatgagctatcattagcatttgcatgtatactgataaataaatctgcttgtgcagaagctgctttatttactctctcctgtaaagaataaaaagtatcattagatcttgacagtactggaagagcacctgaagtatttagctttgtattgactcttttcgctatatcaaggttgacttctttctcaaggagtccattgccgattgctcctgaatcttgatcaccgtgacccggatcaataaagattgtttcacctacaactggattctttagctgattagcaaccttggtgcttacggcaggagtgtttccgataatcgtaaagtttgacatgtttttacttccaataattttacgggctcctgtagataaattttcaccatttgtaaggataagagattgcttcttcttagctgccagtgtagctcctgcaatagagtcagggtagctgaatccattgcttacatatacgatgcttgttgataaattaagtttttgtacgatatttgcagcaagctcatatctgtttgaaccactaattcttgtaggagaaggtaacttgttgtataccgtattgctgatacttccagtgcctcctacaacaacggtactcgaaattcccttatcttttatcacagacgttgtcgcactatttatagatgttttatttgtaaaaagaattggatacccgtttttcgctgcataaggaatgacggccggagcgtctgcatataagaagccattcaaaataacagcttttgaagtcgcacccatcgcttttgccacccgtgcagccgtatcataacggttgcttcctgcaattcgtttaatacttatccccaaacttttaatctggttagcagtgttagatgaaacagcaggtgttccgcctacaataattacatttttagtctgcatctctttcaatcttgttttcgtttcatatgaaagcttatcagaattagtgtaaagcaatggcgcattcttctggtaagcaaggggtgctgctgaaatagcatctgcataggaactcccaccaacaattacagctgtacttgctgttgaatacatttgctttgatatttgtacagcagtgccgtatctattgcttcccccgactcttttcactgaattatcggccaaagctgttggcacaaaaagtatgagccccagaaaacacattgttaggacttttatataagaacgcaattgatttcctccttaagtggcgttatatcctaaaataatcaataacttgtcagagttgtacctggatagtaaaatttcaaaattgaactatatgaatctccagcttctgctcttgcttttgctccatattgactcattccgatcccgtgaccatatcctttaccgctgattgtgtactttgaagtatctttttttacagtcacataagtacttttaaatacagtcgctccaatcattgttcttaactcacttgttggtacactaatggttgtaattttgctcaagttataggagccagtactgcttttaacaaaatacttcactttcatcgatgctgtttttgcacgctgcccttgtgtcgttccactaaagcttaaatcgtcaatacttgcaattttgacagaatcagcgcttgtttctttatttttcaagatccagttcttaactccggaaagtcttgcagaatcagtttcagtcgctgaagaccaccaagaagaaggcttcgttaagtccaaagatttcgtatctagctgttgttttgacaaagtaagcgtccagcctatttgaggatcctttgtatctttttttgcaatcaagtaaggtacacttgatgaccacacttcattactagcttctgtgtaaccaccattactggaagaataagctgcagttataagagatccattatatttcagaactttccccttcgtttgctctaccgctttattggtattcgaattccaactgtagccaccataaacttgaaaagcggttgtatcaggtacagtagttcctgtttttgttattgagtaggttcttgcagcgacagtctgtgctttaagagcctcaagtgaccagctagcaggcatttcattcggaattactccttttaagtaatcctcaaatggaatattctcatttaccggtcggatatatttagtagactcaatagagaaattaaccgtgccaagatactgctttccatcaagactaattctgtttgaagtagaatagttttctggtttaattcttagggagtttccgtaagttttgatgttttcaaggtttaattttccgctgttgatttttagattataggtgctaccgtcagctaaataaaattcatcagcaagtgaattctcaacttcagcagaaattgaactggtacttccaataaagtcgtatgcatatgtggctttatctttcgttatacttttagccgcagccggaacgctatcttgtttaataaataaaatttggctgtttttcttcgaggcaagcgaagcgcctatcagtacgtctgcatattttgtcccgttcgtcattacgactttatcagccttcaactttagttgcttaattatatttgccgtaagttcatatctggttgatccaggaatcctttgcacagttgaagtttttttaatttggttttctacactatcactgacgctaaatgaactgcctataatgatgacttgttttggcaaattataatccggaagcttgtctttctctgtaagcaaaatagggtatccgtgtgctgctgcatatggagcaatggctaaagcgtcttgaaatactcttccggttacaacgatcgctttatcatagctgcccatttgctttgcaatattttctgataagacatatctattttttccgcttatccttttcacagcgccatatgatttcagcttgttttctacatcttttgaaatgcttcgcgctcccccaatgattaaaatattatcagggttaaacttagcaatttgtctttcagtagtttttgttaacgtgtcaggctgagtaaataaaactggtgcgttcagttttttcgccaatggaataacaggcaatgcatcaataaaaatatctcggttcaccaatatcactgtattaggatttttccactggctgttggatgcaagagtcgcagtttcgtatcgtgaagcgcctgcaaaacgatccgtaacagcaacattatctccagttactttataaaatcctgttggcgatagactgatgctagatttatttccaatataatttgacaatttaactgagatgtttgagtctgctgcaaaagaaactgatggaatcaataataagattgcagcaagtgaacacactatcaatcgtttgcaagatttcaaaatttcaggttcctccctatatcttagttggcacgttcaatatcttttaacagaagctgaccctcatcatttttttcatatgtaatcgtgaccttatctccactgttaaacttatcaagatcacttgtcgattcttcagtgatatcaagactaaccggctcattatctactgttacttctattgtatgagtatcagctaaccctacataagtaccttcttttgtttcaatgttactgtctggcgatacatcttcaccttgactcttttgactattaaccccgcaacccgaaagaagcaatataaagaacagtaaagcaataaattttttcatttttttcacctcattatattttatcgtcaacctattttatattttaaagaaaaattaagaaacaatgaaacttttttttataaaaaacgactattttaggatttcattcttgtattaaatagagttgtatttattggaaatttaactcataatgaaagtaatttaacagacgaggtgcaaaggatgagaaacgaacgcagaaaaaagaaaaaaactttattactgacaattttaacgataatcggacttcttgtactcggaactggcggctatgcatactacttatggcataaagcagcttcaaccgtggcaagtattcatgaaagcattgataaatctaaaaagagggataaagaggtcagtatcaataaaaaagatcctttttccgtcttaatcatgggtgtggatgaacgcgacggcgataagggccgtgccgatacgctcatttatatgaccgttaacccaaaaacgaatacaaccgacatggtcagcattccgcgtgacacgtatacaaaaattatcggaaaaggcacaatggataaaatcaaccattcatacgctttcggcggcacgcagatgacggtagacactgttgagaacttcctcgatgtcccggttgattattttgtgaaagtgaacatggaaagctttagagacgttgttgatacacttggcggcattacagttaacagcacattcgcgttcagttatgacggttattcgttcggcaaaggagaaatcacgctgaacggaaaagaagcgctcgcttatacccggatgagaaaagaagatccgagaggcgacttcggacgccaggaccgccagcgccaagtcatccaaggtattattaataaaggcgctaatatttcttccatcacgaaattcggagatatgtttaaagttgttgaagataatgtgaaaacgaacttgaccttcgataacatgtgggatatccagtccgattacaaaggtgcgcgaaaacatattaaacagcacgaactaaaaggtacaggcacgaaaatcaatggaatttactactaccaagctgatgaaagcgccctttccgatattacaaaagagctgaaggacagcctcgaaaagtaaaacaaaaagaagcttcgcacaatgtgcaaagcttcttttttatttgcctgtaaatgaatccggttgttctttccggtacccgtaatgaaacagcaattcttccacaatccggcgggaagcctctccatctccatacggattagaagcctgggacattttcttgtactcatcaggatcagttaacagctgttttgccagctgataaatgttttcctcatccgtccctgcaagtttcaacgttcccgcttccactccttcaggccgttccgtcgtatcacgcagaacaagaaccggtttcccgagagatggggcttcctcctgcacgccgcccgaatctgtcaatataaaatgcgatttcgctgcaaagttatggaaatcaatcacctctaaaggttcaatcagatgcactctgtcagaatcaccaaaatgcttctgagccgcttcccggacaacaggattcaggtgcacagggtaaacgacttgtacatcttcaaattcctctacaattctgcggatggccttgaacatgttttccattggctcacccaaattttcccggcggtgagcggtcaagagaatcattttatcctcacccacctgatcgagaacaggatgtgagtaaccatccctaaccgttgtgttgagtgcgtcaatcgctgtattgcccgttacaaaaatagagtcggcctttttgttttcttttaataaattgtctttcgcctggcctgtcggagcaaaatgcaaatcagcaatcgcccctgtcatctgtcgattgagctcttccggaaacggggaatacttattccctgtacggagccccgcctccacatgaccgacagcaatttgatggtaaaaagcggctaggcttccggcaaacgtcgtcgtcgtatcaccatggacaagcacaatatcgggtttgatatctttaaacaactcatccaatcttacaagtgcgttagacgtaatctctgccagtgtctgccgctccttcataatgttcaaatcgaagtcaggcttgatgtgaaacgcatctaacacctgatcgagcatctgtctgtgctgtgcagttaccgttacataggaatctatttcaggatattttttcaattcaagcacaagcggtgccatcttgatcgcttcaggcctggtcccgaaaacggtcatcacttttagttttttcatatttgtcacctggttttctgctatagtaaataaattcatactacatattctacatgaaaatgcatcattttaaatcatttcattcttgattcaaataaaatgatataagttttaatattaaggataaagcttgtttaaaaatggtttatccgatatcataaaaatgtgtaaaaacatattgaaaagggtaaatagagaatagtttaaccataaattttttcgatcataaggaaggtgccttttaaatgaaaaaagtacgtaaagccataatccctgccgcaggtctcggaacgagattcttgccggctacgaaagcaatgccgaaagaaatgcttcctatcgttgataaacctaccattcaatacataattgaagaagctgttgaagccggtattgaagatattattatcgtaacaggaaaaagcaagcgtgcgattgaggatcattttgattactctcctgagcttgaaagaaacctagaagaaaaaggaaaaactgagctgcttgaaaaagtgaaaaaggcttctaacctggctgacattcactatatccgccaaaaagaacctaaaggtctcggacatgctgtctggtgcgcgcgcaactttatcggcgatgagccgtttgcggtactgcttggagacgatattgttcaggctgaaacaccagggttgcgccaattaatggatgaatatgaaaaaacactttcttctattatcggtgttcagcaggtgcctgaagaagaaacacaccgctacggcattattgacccgctgacaagtgaaggccgccgttatcaggtgaaaaacttcgttgaaaaaccgcctaaaggcacagcaccttctaatcttgccatcttaggccgttacgtattcacgcctgagattttcatgtatttagaggagcagcaggttggcgccggcggagaaattcagctcacagacgccattcaaaagctgaatgaaattcaaagagtgtttgcttacgattttgaaggcaagcgttatgatgttggtgaaaagctcggctttatcacaacaactctagaatttgcgatgcaggataaagagcttcgcgatcagctcgttccatttatggaaggtttactaaacaaagaagaaatctaaacataaaggctattggacattcatccaatagcctttttttatttcaacatcaaagtcaatgtatgctcttcattatcaactgcgaagacctgatcaacggcctgccgcaaaaattaataatcccagacaaacacactgattgtagagttaaacaaactaaatgaaaacataaatacaaacatgcagattaaatagtaaatatcttgtattcaatgcaagctaagtaaacaccacttgctaaaagaacaatgactaaacaaccagcattacaaaataattaaataaatttgaagcaattacaacagaaggcagtgaactgtcggaaagttcattttggctaccatattaatcccttttaatttaagagccaggccctcaaattcctctattcggtcggcatgtccaaatatatccatccatcatttttatgatttgcagaaatgttcattatctcaattttcacgtttaacccttcgtcgaagagttaactctatagacttatttttttaaactggtcaaaaaaatcagtgtaataatccattgtataatgcacataaaatttgccccatggatggttttcaaaggaattatagcttttatttttaaataaatctatcgcctcgatatcattgaagctatctaatacatatgcgtcaaatttattccaaatcttattataataatcaacatcaattactttgatgttccctccatttataagcaattttttctgatcttctttatcaaaaaagtgatgaacgtttcttgcactatttaagataattttggttttagggcaatttaatctgacgtagttatagaaaagattaaatttctgtttccatagtgcaaaataattttcaaaatgatcttctatattaaaactttgttttttattttgaattgtaaatttataataattcgttttagggagagtccatctgttatttgtaacaaactggttatctgaaatttctacgtagccaaaatgcacatctgcgaaaaagtccaaaatcaaaatgtctggctgaacagatttaatctcggttagaaagctattctcaaaatccgtctttaaagtgtttttttcatgattagacatgttctcattatcaataacaatgtagttaggtttactcattgttgaaataatggacgattggttttgggtcaatacacaatcaaaaaaatttttataatcagcattaaattgagagttaaagttatcacgtgtaacacaactaccataaacagctacttttttcatttctttattccctctttaatattagttcctagactaataatttgttgataaacacgtttacagttttctttatccgtatacttataaaattgatttactctatcaatatatttggcatccattatacaatcgttttccatacaatttatcagcttatcaactaaagcatctttatcagcaattacttctccaaaccccattgaattgtaatcaaaataccctttttccaagtgatttttttcgtattggaagtaaaaaacaggttttttaagataagcaaagtcaaatgcaacggatgaataatctgtaactaaaatcgcactattattgaaatgatctcgataactttcattaatgtccgcaatcctcactgaactatttttgttgaaatctttcaactgctgaacaatatttggatgcgggaagaatacgatctcgtatcctttttcattagcctcattaatgagtttagcatcatttaataaattattaagttcattaaaataaactgagtttttaaagagtggtgagtaatctcttttccctgtttgcggatttatttttcctactaaatgatttctccatgttggcataattaatatctttttatgattatgattaacaagcttatcaaatctaggaaatccagttagaattacttctctttttgaataattataatgaccattaattatagactcatactcaggttgagcggctgtgataaatagtctaatatttttcttatacttattaagccatcccgaaatatcatctttcgtaattccatgttgaagaaaaacaaagttaaatttaaataagtccttataatatttcctcatattcacaaacgggttgactacataatcatctgcatgtgaagagataatttcatcggcaagtaaatgtaaaaatttgtgcttaggtgacccgtatgcaacaactggtcctatttttttcagcctgttataatctggactatctttactgataataaaatattttttgatgccgtcattctgctgcattgcatattcaaataatgcttcagcattatcatctgccttgttgattctatccataaaaagccatactcttttatttttctttattttatagaggtgttccataatctttcttacatttgatgctttctcagcacctattttattaaaggtcttaaaacgtctttgagcccgcttttcttttgctctaataatctgatttttatcttttagaactactaaattattaagtttatgatcgaaataaatccctataccatttttggtatagaaatcaactatatgtttatccagcgggaataatcgtccaaagttaatttttacttttattagttttccatttgatgaaatcatcatttcaatattcgagttatttgcaagctcaccaactgggatatcaaccttaaagcccaggtactctttaactggcttatttaagcaatataagttgtgtactgttctatcaattttttcggcatgatatatcttgtcattgacacatgctttcacttctaattctgcggcatcaaataatgaaccaaaattaccttcaagggttaaaatccccttttcaatgcttaatagctccattgttatagcttcatatctcatagaattaattaatttctctttaaaatataaattcacattacgattcaaaaagatctttttaaatacattttttttatttcgatatttcaatttgattaaaaaatattttctgtgcaagtttagagatttttgttcaaagattatgtcgtcatctataaatgcaagtattctttctagcaagtcaaaaaactcttcaacttccttatccgtcaaaacatcagttctgtcttctatatttattctccactgcaagtcataggcaatcatatactgaatgtatcttggaacgtatcctaaagttgtaatactatgattaattaattctcgagagaaattcttcaaataatccacataccattttttatcatttttacctgtttgagttgcagatgacgcatcttctcttcgtcgataattatattgtccttctgacacaataccgtatacttggcgcttcattataattttagtcagccattcactatcttcagcgtaggccatatcttcattaaaaaagtgatttttaacagcttcttttttcacgaatgaacttggtgctgataattgaattcctgtatgttctttcaagatatgaactagcctagttttatcaaatttataatttaataagtgtggaccacttgttttaccaaacatcatcattggaatagaaactacatcgactttagaataattcttttcaaaaaaatcatatacttttaaaagggttgaaggggacaatgtatcatcaggatctaagaaattaatatatttacctttggcatattttaaaccctcattacgcgcactacttgctccgccattctccttatcgataaagactatattttctggatacgcttctttatactttaagcaaatttcccctgatgcatcaacacttccatcgttgactaaaatcaactgtatatgatgctcaaaatcaagtgcctgatcaattatgcttgttattgcttcatctaaaaattcttcaacattgtaaattgccattataatagaaaagaaaaaattcttttgttccaagtttttcaatctcctttaatttatttctttttactcaagggtattagattctaatcaacttttgaaatattctagttaaaacattaactttttgaagatcaattaaattgttgtctttttcaacaataaacctaaaaaaagtaactcctatcggaagttttaattgatatgaagaatattttctatccctaactgtggttccccaaataactatgttcttatgttcttgcttgtttattaattttgcttttctcaattttcttccataagagatataaacactatttttatcgttaatcacagactcttcattactcaaacttaccattagctcaattgaaaatttattgactttccatgaagtaataacgattttttcattttctagtttccctaattgaataagtctgttgacaggataaccccatcgtttaaatgaaatgagatactcttttaaatatgttttcatgttttgttttacaattaaattctcatctatatatttcaaaacgtgaaataattccttaaaaaactcactctgttctatcttatttagcacttcataaaccttgttattgtttttttgaaaaataaataattttaaatgattaagaattaaacattgaacataaggtataacttcgctgtactcttctaatgatcttttaaccatttcaccatatccatttgtaagtaaaaaagtatacctgttttttttagaccacgaagtgtctactagagaatcctcactttttctttttctatagaaatatttagcggcaggaataaggccatatttttgttctttaattaaaaacgtattaataaataaaacatcttcccaaaaatccattttttcattaaaagcaagaccaagacgttctattgctttttttcgaaaaaatgttccacctatgtgataatgaatagcagtgtaattatcagttatgtttacaatgctttcaccacttttaaatctataattaagtgagtgttctccatttttattatcgaagaaaaatagcggcagtaccgctaaattaatatcggtatgcttttcaaaaaactttaatacctcagcaatagcatttagtgagactttgtcatcagaatctataaaccctatatatttactattatcacaaacttttaatccattatttcttgccatactgacattcggttcatcttgataaataattttaatattattcggatatgcagttgcgtattgttcacatatgttttttgaattatctatgctattattttcaatcaatattatttctatgtttttttcaaaattaattgtctgatcaataatactgtcaatggcctctcttatatataatcccgaattataaacaggcattacaattgaaaacaacatctcaagtgctcctttaaaataataagtttttatccgagtagtcttccacaactttttttgaatgaatcatcttttccaactaacaaaattggtcataaaatgaagtaatgttttcatcctgtttatagtctcttgttttatgtatggattcaatttacttttatgttgttttaaaaagaggtcccggagcacacttttcaaaatcataataaaaatctcttagtttatctctataaaatttaatatcgggaacataacgcctttttaaaccgacataataagcaaatactgaagaatagtctgttattaatatatctgatattaagtataattctctaatatcattatgatcagaaaaatcataagcaaaacccatgtattcagttaagttaatattttcagatacaagatagtggacccttaaaataacaatatattcattacttaattggtctttaagactttctaaatccaacaccatattaaatttatatttacctttaacataaaatgagttatctctttttattttcagcattccttcattgctattttttttatataaaaaatcgttcctcggatagccctattcaataaacgtctttttaaactgaaacgcatttttaaaaattttcgtagagtaagcattaagggaaatgagataaccgcatttactgacttctataagaaagtttcttttatattattcagtcttcatgccgggcatatgtactttatccatgtcatttgcatttaggggagttccgtgcccagtgtgcacatatgtagtgtttctcggttttagaacctatagcggcaagtggctgtttgttatccaatattttgatgtagccaaatacaacagccatttgagagagattttttcaaataattctcatctgaatcatcaaataaatctttgtctcttttatctacactccaaaatatccatattcatatttattcttattttcctcaagatactcgaaaattgctcttggattacagctgaattgtttgcctgaatagctttcgaagatgagtaatctttcgtttctgggcaaaagcccaattattctaaaaataattgagtatacactgaccaatagtcttctatatttcattaaaatctttgatttcattttagactctttaaatatcaaagaattaaatacttatctcagcaaacaagaaaaaaagaagcaactgaatgattcaagcctcttttagttagtgcgtctataaactagccatgtgttttttgatttggtagttgaaatggcttttgttcttgaaaggtaaactttccagcagcttcatatgtccgtagtgaaataaatcaaatgttccgtacgttatcactttcttcatgagataacatcaccttccaactgagagtaccagaaaaaaaccaaaaactttaacaggttgtttatcatttcgacatattttttacgtaccattaataatgaacaataatagcataagttcctataaaagttaagactctttaaaaatgttaatcaccagcatttttttgtatcaccgttgtattgttgtatattttttgcaggtccaatatcttatctataccctttataacgagttttctttttcggaaaaatcgattcttttgtcgcgtttttaagtgaaacgttttctttctgcaacaccatttattttgtacgcccttctcatattaatacatcgtcaaaacatgaaggaattgtaatacgaatgttaaaagttcctaaagatttttgcggtaagatagagtaaaacacacttgtttttatagacatatagatgaaagaaaggttgatacgatacaaacgaaacctattaattaattagataaagaaaaaaccgagcttcttgagaaagtgaaaaaagcttctaatctggccgacattcactatatcctccaaaaagaacctaaaggtctcggacatgctgtctggttcgcgcccaactttatcggcgatgagccgttcgcagtcctgcttggagacgatattattcaggctgaaacaccagggttgcgccaattaatggatgaatatgaaaaaacactttcttctattatcggtgttcagcaggtgcctgaagaagaaacacaccgctacggcattattgacccgctgacaagtgaaggccgccgttatcaggtgaaaaacttcattgaaaaaccgcctaaagacacagcaccttctaatcttgccatcttaggccgttacgtattcacgcctgagattttcatgtatttagaggagcagcaggttggcgccggcggagaaattcagcttacagacgccattcaaaaactgaatgaaattcaaagagtgtttgcttacgattttgaaggcaagcgttatgatgttggtgaaaagctcggcttcatcacaacaactcttgaatttgcgatgcaggataaagagcttcgcgatcagctcgttccatttatggaaggtttactaaacaaagaagaaatctaaacaaaaaggctattggacattcatccaatagcctttttttatttcaacatcaaagtcagtgtatgctcttcattatcaactgcaaaaacctgatcatctgtattcacaagaaaacgcttcttgctgctgtcatacaatacatcgctatcacttaaggatagtgacgccgggttgataggagaaatgttatgaaaaataagctctgttgctttatcattctccagtacataactgattttttcataatcaaaattcagcgtttttctgccgtcagccttatttccttcagtataaccattcaatttcgattgaatgctggtgctgctgtctcctaggaatttcagaaagtattcataggaagatgctgcgttttgcgagacataagacgtaaatgcagtggcatgcaattcagcgtgtttcatgttagttgcaacagcgctctgtttcacataataagagtgcccgtcaaactttattttcgctgcttgtttgccttttgcagctaccgttacttttgtaccgaatggcagtgtaacgtcagccttctgtttcaaaccctgatccttataagcagccgctttttcatttgctataaacccttgcttattgattgcagttaagcgttcctctgacttgccctttgcatcgccatgatggttcttcacttcattttgcggaatagcgccaaacgaagcaattgtacgaagcggggcattaaagaacatcgttcccgccatgaagacagtcagaatagacaaaatagcaatttgaatggcattggccagtgatttcggctttttcttctttttgcggaaacgggcaaacgcttcaggatcttctttcttcctctcttctgtctgctcttttttatatgtctctttttcttttttcgatagcttattaaaccagtcaataaacgctttgtactctttcacaaccgtttttgtttcatcaaacatacgaagctcgccatagtgcatccaagcaacacggtcacacatcttttcaatctgaccgattgagtggctgacaaagaaaatcgtttttccttgctttttaaactcatttattctgtctacacacttctgataaaacgtttggtcccccacagaaagagcttcgtcaataattaaaatgtcaggatcaatatgcacggagatcgcgaaaccgagacgcgacttcatcccgctggaatagtttttaaccggctgattaataaaatcgccaatctcggcaaattcaacgatgctgtcatacatatcatcaatttctttattggttaaccccatcatcaaacacttgagccggacattgtcccggcccgttaattggttattcaaaccggcagcaatcgcaatcagcgacggctggccgttcatttcaatttcaccgctggtcggcggaataattttagccagcaggttagacatggtcgattttcctgacccgtttattcctacaaagccgattgtctccccttcatacacgtcaaaggagacattccgcacagcaaaaaaaccattatccttagccggaaaaaacaatcctttaatcttgtccgattgttttttatacaaatgatactgctttgaaacatttcgaaacgaaacttttagtttcatcgtaaaatctccttacgtattaaagaaagtcaacaaacttgtctctgaatttcatatgcaggatagaacctactaacaataaaaggaatgtgaacaaccaaaagtacagcgtgtacttcatgtcatggaaaaaccatgctccatctaagaagctgttccggaatccttcaataatatagaatagtggattcaacttcagaacaggcactaattcggggtggctttgaccgagtttcgcattaacatcccaaaaaattggcaacaagaaaaacaaaagtcttgttacggcctgcagcaaaaattgataatctctaatcagcacactgatcgttgagttaaacaaactaaacgaaaacataaaagcaatcatacagatgaagtaataaatatattgtaaccaatgcacactcgggaacacaccattaactaggagtacaatgatataaatcaccatcatgatcatataactaaataagttagatgcaattgccacggacggtagagaactaatcgggaagttcattttagccaccatattaatgcgcttaaatacactatttgatccatcaagtatagttggactgatgaaaaaccatgggattaatcctgccagcatccaaataataaaaggcacttcgcccgctccggttgtcacaggaccgccctttctaatccccataccaaatacgaaccagtaggccagcatttggataagcggatttaagaactgccataagacacctaaataattcatttgatatttagacttggtttcataagccgccaatcttaaaattaaaggaaatgacgttatttgctctctgagtatacgcaacaaatcattcattttttatcttccttagacttaattgtttttgggaatctttctgtttaaaatttgaaagcaccgctgattattgtaacagatcctgcattttttttcacttctcaacaagtatctaaaaagctgccgaaatatcgacagctatacattttataaaataacctaaattattcagctttaaatacagtattaacaaccttttcagatgaacgtcctgactctaaatagcaaaacttatcatagaaaggaccaaaagaaaccggaagcttataatcaggcgatgagatctgcttgatagcctcaatcgtttcttcagtagtttttaccaaaggaccaggagcttctttttcaaaatcaaagtagaaaccacgcaacttatcccggtaggtctcgatgtcagggacaaagaatagcattggccgttttaaatttgcaaaatcaaagaatactgaagaataatcagtaatcagcaaatcagaaaccatatacaattctcgaatatcctcataagcagaaaaatcatatgcaaatccttcaaaaggacctaaatcaaaattctcagctaccagataatgcattcttaagattacgatatattcatttccaagctcttgtctaagttgatgcaaatctaaatcgagatcgaacttataacgcccttttgcataaaactgatcatctctccatgtaggggcatataaaataacctttttatcacgaggaatatttaacctactctttatcaatgatattgtttcctcattattatcattatgaagaaaatcatttctaggatatccagattcaatcattgtcttgttaaactgaaacgcccgtgtaaagatctcagttgaataaccatttggggaaatcaagtaatcccaattagaagcttccttgataaaattccttttatattttttggtgtttgtaccaggcatatggacttcttccatatccattgcaagtctttttaaaggtgtgccatgccatgtttgtaaatatgttgtatgactaggtttcggaatccataatggaagccggctgttaacaacccaatactcagctcttgccatagcgaagagccattttaatgagaggcgattaatgtaaggaattcccttttcatcaaaaggcgctgaatattgtttatttacactccaatacattttatactcagggtggttttcccgcatatattcgtaaatcgctctcggattacaactgtattgtttcccattaaaactttcaaaaatgactgttttccttttaactggcattctgctagccatcatgaatagagatttgtatgttttagtgattaacttgtttctcatttttgtgatcttttttatttttgatactaatctcttcttctttcctttaataaagtatttaatccttgttttcaggctatagtcgtttactctgatacctagagtctgctttttctttttcttaaagacttcataacgaactggtgtgttgtttgttttaataatacttactaatccttttaatttgttttttcgatctcctaaaacaagagcagtgctgttgaactgaatatccgttccttcatcgtcattgcatatatactccataaaaagacgataaacataacgtttttcatttgagaaaggaatttctttcaaaggcactttcacttcaaaatcatacagttccggaacaaaaccatctgctctcatgttttccaggccatgtgtttttctttctagcttgattggaaatttttcctcaataggtgtttctccacccttttttaaaataaggttcaagttttttatccgatattgattttcggaactcaggtaccccgcataacctgttatgcttatttcttcagagctaatctcgatttgatcaaatctgatgattttggcctctcttttcaccttaatagaaaagttgcctttatcagttgtataaggtaaaatcaaaagttctgtggtttgatcgacatgaaaggcgcgctcaattgaatttacttcagcagaaagacgcttcaagagtggttcctgctccgcatcttcatatttttttcgaaattcgacataaaaatcatatgtttgtcccatttcaacaggcataggcaaaacatgagcatttatctcagttttatactctaatgagccagtgttttgaagcggaaattcagattccgttcctgaacgtctctctttcagctttaaaaataactggtaatcctctaaaaattggtgttctgaatcaattgagattaacaattcaagacttcctaaattgtttttcaagcttttcaaaatacatttaatcacagtgttttcaatcattacttttttctgctcctctgtataaaagctctttcctttttgcttccttttattagtgtcaactactaaggacattacccaaaatattaactctcttttatttccgtgaccctccaagagaaattgcctttaactgttgtatagggctctactctatagccattattagtatctatactgtttcctgacaattttgtttcttcactcgaaagtcttcgcattgttttaatatggccatttgcattgaaaacaatataaaaatcaataacttgggttttattagcagctatcttttcaatatttacatctttttcgagatcaattacaaacagttgatcattttgtaagtttgttgaaataatttcagccttattctttctgtccaagcccactaaacgtatttttttaatatcattatgatcaaaattctcaatgtcaatttctattttagttttatcaaaatcctcagtataggaactaatagaaggatctttttttccaacctttttagagaacttctctctttctattcgcacctcaatcatctgattaagagcaaaagcccaattttcaatatagttgggtcttgaatatttttcagccattttaaaagcttgttctgaaaatttttgatgagtactttcatctttcatcaaagagataatagcttgacccaatttctctatattatactgttcaatgacatatccatttgctccgtcagtaactaagctccttgctccgtaatcataatcgtatgttacaactggacatccattgctcagtgcctccatatttgatagaccgaacccttcaaaatgagaggttgaaatggttagccaagctttttgaaactctgagtcagggttatccgtatagcctttcaaaaagacattattctgcagtttggtatcttcaatttctttttttattttttcgaaatcttcacccgatccgaatatatcaagttttgcttcaggaatttctttcacgactaaactaaatgcttttactgcatgtatcagatttttcatagatgcaagtcttgaaataatgacagctttgtatttttcactcggcacattcaatacagcgggatcaagaggcttatcaattgtatgcggagtaaagaaaaacgtctcttgttcccctgaaatcaatttaaaatcttctagctgctcctcagttataaaaaagacagcatccaaattatacatctgactaaatacttctttatagcgacccttaatttgatatttattgctgccgtaatgcttgttatgaataattgctccataataggaagaaggtgattttttcactttaaagacatgtttgtcttgcggtctgctgtccactaaaaacaacttaggtttatcattttgtttttgcagatattctatccaatattgacgcagttccgattcatcttttacttttatctcaccctcaagggagtaccaaataatatgagataattgaacatctttttcttcattgttccatacatagagtttgtctaaatatacttgattttggtcattaatatattcctgcagatacatcttgtttagctgcacatcataatgagtaacgagaactaagtttccgttcttcgtatattcctctctctttatgagctggtttttatcattccaatagtcgacgtaccggatagtttctccatctccgtagtaaattacagacatttcattgttcttcttaccaaacaatctcgacacagtttttgcaaattttcccattccaacttgcttttttatctggtcaaggcctatcctttcttcgtatgatcttttcccatttgttctaacacttaaaaaatcatcgaatagattaataacacttgtgaattttttatcaatcttaccgttgctgtacaattcatcaatttttgaagacaactctaaatcaaaacgaaacgttaagaaaaaggtgttttggttacactcttctccaaataattttgaacgcaataataatgatttcgtcagaccgccataattacttggcagtccaccagagataaaataataatccatgtcaggaatttgttttatattagattcactcaccgcatgtaaagacaattttttactccctttcggcatctagaatatatgatcattgaaatttatatctacccggatactttagtcacaaaaatcaatgtaagcatcaaaaagtacttcttatttcaataagaagtactttaattagatattgaaccaatgatatcaggatcctaaattataaaccagcaatttcctctttgatctttgttgtagagatgccttctgttcttgggaggtaaacaacctcacactgatctttgagaaagtcaaatttaccttcccagtcatcccccataacaaaaacatcaatattatgatcaataatatcttgctttttttgctcccaattcttttcaggaattacttcgtccacatatcgaatggtttctaaaattaatttacggtgctcatagctgtgataagcttttttttgcttttgtaaattgaattcatccgttgaaatagcaacaactaaataatcaccaagctgctttgcacgctcaagcaatttaatgtgaccccaatgcagtaaatcaaaagttccatatgtgataacttttttcatttaaagaaacgctccttcctaatgttaaacactattaaaaacactactgacgttagcgattaaattctaaaaacctgtttgtattccttatatcgacatatttctcgtatgtcttcactgatcattaattatagcataccgcctaaaaaaggttaagtactcatgaggagaaaaacattccaaaatatgtaattacactcagactccattggcaccaaggtctgttgttcattcgttcattcaattgtaaaattggaaacatatttaaatttaatgtaaagataatgttaatcctttgttgaagatttatgttaaaatataaggtagcttgattttgcttttagaaactctcggtttttaactatataaatagaatcttaaaggaaggaggagccagacatgcaaacagagactattcacaatattccttatgttaacagtaacttaacatcatttatcgattacctagagaaacattatattgatcaaaagattggtgctgtcatttccacagtcaaccctgaaattgcatttgcagctattaaagatcgggactactttgatgtactatcttcttcaaacttcattttgcctgatgggatcggtgtagtcatgatgtcacgtttgactaacaacaggcttcagtcccgaatcgcaggttacgatgtttttaaagaacttctgggcgttgctaacaaaaagaaaaaacgcatatttctgtacggtgcgaagaaagatgttataaaaggtgttgtatccaaaatttcttctgaatacccaaacattaaaatcgcaggttattcagacggttatgttcaagatcgcaccctagtggcaaaacaaattgcaagagcaaatcctgacatggtattcgtagctttagggtatcctcatcaagagaaattcattcataactacagacacttgttccctaaagccgtatctataggtctaggaggaagctttgatgtatttagcggtaatgtcaaacgggccccttcctggatgatacgtttaaatttagaatggttctaccggttaatcttgaatccatggcgatggaaaagaatgcttagcatcccaaaatatgctttaacggttttaaaagaagaaaaaaacaaaaaaactttctatccaaagcctgaaaaagatcatacaaaacagatttaaaaacgaaaactttcaaataaatggatgataaaaatgaaaataagatcactactggcgaattgctatttgtattttttatcagcaatcgccttttttctgcaatgggtgaaacctgaaagcaaagtgaccctcctgatctcattcgaagcaaacgcaaaagcgattcttgaggaatatgaacaaggacaatactcttataaacttaacatcctgtatacccagcaggcctctgctattgccgagagcttcccgaatgtagatgcatatttattacaagaaaaaaaccctatccatctcattaaagctgtatacctaatgtttaacagtaaagtgatcataacagataattactttctattaacaagtgtgttaaataagcggaagcaaacgaaatgtatccaagtatggcacgcaaatggctcactcaaaaaatttggtttggaagacattacaaacatgcaacggacgaaaactgatattaaaaggttccaaaaagtatacagttcgtatgattatttaactgttggctcagaagagatggcaaatatcttcaagaaatcatttggaataaaggataaccaattattaaaaataggtgtacctttaacagacccttattaccgagaaaacaagaaaaaaatttcagatactctaaacatacaaagaaaaaaaataatcctctatgcaccgacgtttagagattataatatgcaatcaattcaattgccttttacagaagaacaattaattcatcagttaaaagaagaatatgttttatttgttaagctgcatcccgccattcagaacaatattgatattaaatattccagtgattatattaaagatgtttctaattatgccttgtttgatctactcatggctgcagacatattaatcactgactattcttctgttccctttgaattttcgattttaaataaacccattcttttttatacttatgatttaaaactttatcaacagaagcggggattggttgataattatctttccataatacctggaagagcctgctatgacagtgaatcattaataaatgaaattcaaaccccatttaattattccaaaataaaagttttttccgatagatggaataagtattctgatgggaattcaagccaaaatttattgaatttcatcgaaaatttaataagctaaatgatgacacttgttcaaaacagaacaagtgttcttttttctcttgactaccgaacgtatgtttgctttaatgtaattagttgcttatggcagcaaataataatagaggtggtaaatttatgagaaaaaaagaactgtttgatttcaccaacatcacaccaaaattatttactgaactacgtgtagcagacaaaaccgtacttcaatcattcaatttcgatgagaaaaaccaccaaatttatacaacccaagtcgcaagtggattaggaaaagacaacacccaaagctatcgcataactcgtctatctcttgaaggtttacaattagacagcatgctgttgaaacatggaggtcatggtacaaatattggaattgaaaatcttaatggcaccatttatatttggtctctatacgataaaccaaacgaaacagataaaagtgaattagtttgtttcccatataaagcaggcgcgactttagatgaaaattctaaagaacttcagcgattctcgaatatgcctttcgatcatagggttacacctgctcttgatatgaagaatagacagttggcaattagacaatacgatacaaaaaataataataataaacagtgggtgacaatctttaacctggacgatgcaatagcaaataaaaacaatcctctttatactattaacattcctgacgaacttcattatttacaaggtttctttttagatgacggttatttatattggtatacaggagatacaaacagcaaaagctatccgaatctcataactgtatttgattccgataataaaatagtgctgcaaaaagaaattactgttggcaaagacttgtccaccagatatgagaataacttccgtgaaccggaagggatctgtatgtacaccaatcctgaaactggggcaaaatcattaatggtgggaattacaagtggaaaagaaggaaatcgtataagcagaatttatgcataccattcttatgaaaacttcatgaatcatgtacctatgcttcgatcccctttattaaaaaccgtggggcaccaagatacacctccagaaagatttcaaccatttatgcaaaccttcattttagagtataatgctcaaaacaaaaaatggatggttccgacttcaggttatttaccatcttacacatcaaatttagtccgaaatattactatcaatgcagatggaaacttgcaagtcacattaaatgaacgctatattagtttactgcatcaatcgatagaaggagatttccgcttaaaacaaaaggatatccgaatgggatcctggtattttgctggcggagaaaaatcaaatgtgcttgaaataggttttatgaaagggagtacaaaaatcagacccgatgatgcagccatctcaaatgcttcaagaatgagtatttttatgattgttgcggacaagattgaggtgtgataaacaaataggctgtagctattaaatagctacagcctatttgcaactttctaagttttttatcgatattccggaacatcaaaataaagtgtatagccgtccagcaatgaatacaggctgtacatgcggtttacttgtttgtacgcccagccgatgtctgttgcgtattgatgtgtcgctgtagctgaccatctcattttgtacagtgtgtcctgattgtaagctgtgttgtggatatacgatgagcctatgaatttagctccgccgataatggccgcttcaggtgtgaaccagccctgctcgtacgcatatttggctccgtagtaattcggattgctgtcgtatgctccaattccatacatgttgtatacggtttttccgttataggttaatccattggctaaggcggatgtcccgtttcctgtttcaagaagagcgtgtgagattaaatacagttcgttgatgctatattgattggcggcatcgataaatgcctttgctctccctgtcaggatgcctttacccgcaagcactttctgattgacctcagtaacgctgaggcccgctgtctgtgacagcttgagaaattggaagtagtatttgctgtctctggtaaagttatttggatccacgtattgaactacttcatcactgcttgcgtttcgccagcccaaattgatcttagcccagccgtttatctgtccgatgattttcactttatcgccttttttaaattggccgatcacgtttgtcgggctgacttccggcgttgaccggatatttagtacatcagccgtaacggttgatgttgctatattaatgtacgtgagcgatacgtaagccgctccgtctgtttgcggacttactgtcatttgtttttggaccatatcacgaagcgagagattgtaatttgttttcatgatttgcgggccgtttttgatcttcacgatagatgatgtccatccgtataattgttttagcttcgttgatgccgcagcagctgtatcattgcctgtgaactgctcatttacgctgattttataaagcgtattgcttttcgttgtgtagctgggggttacacttttcgatttaagataggttaacccattattcaatgctgttttgctgctgagctgtgttgtcacgattttgtattgtgtatatgctgtctggcctgtttttgatgttgtgactgcgatatgattttgtttgaaaaatgttaaaacgcggtcaatctcttcttggctgataatagcttcagttgtgatttgatagctgctcgcagctgtctgaccggttttctggcttgctgctgatatatgattcgatttgaaaaacgtgagtgcctgattgactttcgtttgatcaagcagagattcggttgtgattttaaacgtgccagctatttgttttttgacggatttcgcagaagcactcagctgatttttctttaatatgttcaagccctttgtgacttttgcttgatctgatgtttcttctgagatgagctgatattgattttctgctgttgatccagctgctgtttttgcagcttttacttttttctgagcaaagaaggctgctgctttgtttgcttgctgctcgcctaaaatctttgccgtcgtgatttgataagctgcagacgttgtcgtttttttgacgctggatgacgtgtaatgccattttttctttttaaagaaagtgtctattttttggagctgctgttttgttatacccttcatattcacggtatatgatgtgctttttccaacctgttgataactcccggatacgccagtgtttttcttgatttggctgatggcgtcctttactgtactcagccctttgaaataagctgattggacattgtatgactcaacggttgttttttgattgatggacttgtagctgcctgtgatgccagtgctctgtttcagctgctgcaatagagttttggcattggcttcacctgaaatggcggcagttgtaaacgtataataggcttgccctttcactgtttcctttaatgatgcctgcagcccagattccttttggaaggcgtttttgatctgcgctgctctgctgtctcccacgattgtgccagactgaatggttgtgacagacaccgtgtgtgtgatgggctgatacgagcttttaatccccgtttgcttggccaggctctggataagcgccttgacttttgtctcatcagcaatgtctgatgtcatgacgttcatatagggctgagctgctccgtaagcttttacagcgccagccactcccgtctcctgtttcagctttgctaggatagtgttggcctgtttttctccggagatggcacctgacgagatggtgacatatggctgtttgcttccaacaggacttgacgttcctgtaatcgatgtctgtttggcgagtccgctcagtattgctttcgcttctgattcgctatgaatgcctgaggcggaaatttggtaggtcgttgttgtgcctgaagcctgataggatgcatcccagccagtatctttttccagtttggcgacagcttgtgaggcttggctttctgtactgaacgtattcgacggctctactttatatagtgagtagtcggtatacgcggctgcctgggcagaaccagacatggcaaaaaaggcaagggacgcggcggatagaagcataggtgcgattagtctctttttcattccttctcctctttcttattctatgagtatataaaactagtttatttatcggcacgcggttgcttcatttataggtgaatcacttccattttctaataaaaaaaaaacttaatctcgaagtgagattaagtctaaatatgagacacgataagggtacaaggtccttttatcgtaaaatcgggcatttgagccggcaaaataaagtgatcgccttttttgagcggacatgttttgtcctcatacatgagcaaaccgcttccttctatcacgctgcaaatcagaaaggattcatcctgagccatttcagcttcgccattgatgtcccatttataaaccgaaaaatattccccttggacaaatgttttaatggttattccttttctagattctgtcgattcatctatatacccgtccacatggggaaccgtggccgcattgaccgctttcgcaaaatgaagctctctcggacttccgttgctatcaagacggtcataatcgtacacccggtatgtggcatctgaattttgctgagtctctaaaacaagggcccccttgcacaatgcatgcagcgttccgctcggcacataataaaaatcacccggtttaattttgattcttcgcagcaggccctcccagtcaccgctgttgatcattgtgacaagttcggtttttgagcgggccgtatgcccgtaaatgatttctgcgttttccttacagtcgataatgtaccagcattccgtcttgccgagttctccctcttcgttttctccggcatagtaatcatcagggtgaactttaattgacgtatcttccttcacatccagcagctttgtcagaagcgggaaccgatccccctctacgccgccgaatacttcacggtgttcttcccaaagctcgatcaatgtctttcctttatacgggccatttgcaacagtgctcggtccttttggatgagcggaaatggcccagcattcccccgttgattctgaaggaatactgtatccaaatctatctcgtaaagcggttccgccccagattttttctttaaacacaggcgttagaaaaatcggtgattgcgtcatgatccgtacccctcccctgtaaataactgatcatcattttcccggtgcgcccctcttacaaacgcccgtataagctgtcttttttccgatgacaacatatgtacaaagcatcatcttttcattaccccttcaaagaaaacgcttcctatctattatatcacgtcgaaaagaagctttgtttcagccttttcctcgataagaataattctccttttttgatacaaattaataaaaaccgtcaatctgtttacgaaggagagaaactatgcaaatcgactctgatctccagaacaatttagacaaactgaaaaaaacattgggacaaaacgacgatatgatgttttatacatttgctttcggagatagcagacaaaaggcgtgtttactgtatattgacggtctgacagagaataaaatgctggcgcaatacgtcatttctcctttacaaaaagaggcgttagcccataaggaatgctcgattgaagacttatccgccttttttttcggctttcaccacagcgttgtttctacaatgaaagaaatagagcagctcgttttttcagggcaagccattttgctcgctgatggctatcgcggaggattagctttcgacaccaagtcagtcgcaacacgcagtcttgatgaaccctcctccgaagtcgtggaacgcggccctaaaataggatttattgaaaaactgcggacaaacacggcgcttttgcgtgaacggacgagtgatcctaatctcgtcatcaaagaaatgacactcggaaaaaggaccaaaaagaaaatcgctgtcgcttatattcaggatatcgccccagattatgtcgtcaaagaagtgtttaaaaggctgaaatcagtcaatatagataatttgccggaatcggggacgcttgaacagctgattgaagacgaaccattttcaattttccccacaatattaagcacagaacgaccggaccgggtcgaaagttctctattagaagggcgagtgtccatattagtggatggtacgccgtttgctttgattgtaccggctacggttgacgaatttattcattcgcccgatgattacagccagcgctggatcccaatgtcacttgtacgccttcttcgttattccagcatcctgatcaccatttatttgcccggtctgtatatttctctcgtttcttttcacaccgggctattgccgactagaatggccatttccattgcaggcagcaggcttaacgtaccattcccgccttttgtagaggcctttatcatgatctttacgatcgaattgattcgagaagccggattaagattgcctaagccgattggacagacaattggccttatcggcggcgttgtcatcggacaggcagctgttcaggcgcaaattgtcagtgcgcttatggtcattgtcgtttctgtcacagcactggcatcctttaccgttccttcatacgcctataactttccgctgcggatcattcggatcggggttatgataagtgcaacagcgcttggcatgtatggcgttataatggtttatctgtttgtgatcggccatctcatgcgcctgaaaagctttggacaggattacattatcccgatcatggcgcagcctggacaggatttgaaagacacagtcatccgtattcccacgatgtttttaaaaagaagaccgacacgaaacgatcccgaagataacatcagacaaaggtgatggctatgaggaaatcagagcataaactgacatttatgcagacgctcattatgatcagcagcacattgattggtgccggggtgctgacccttccccgctcagccgccgaaaccggcagtccgagcggatggctaatgatactgctccagggcgttatttttattatcatcgctctgctttttttgccttttcttcaaaaaaacagcggaaaaactctttttaagctcaacagcattgtagctggaacattcatcggctttctattgaatttatatatctgtctatatttcattgggattgtttgctttcaagctcggattttgggagaggttgtcggattctttttgttgaaaaatacgccaatggcagttgtggtgtttatatttcttgcagttgccatctatcatgtaggcggaggcgtttattcaattgcaaaagtatacgcttatatttttcctataacccttattatttttatgatgcttctgatgttcagctttcgcttgttccagcttgattttatccggccggtatttgaaggaggctatcaaagctttttctctttattcccaaaaacattattatatttctccggatttgaaatcattttttacctggtcccctttatgagagatccaaagcaagtgaaaaaggctgttgctctgggcatcgcgacttccacattgttctacagcattactttgctcattgtgattggctgtatgactgtggctgaggcaaaaacggtgacatggccgaccatttcccttattcacgcattagaggttccgggtatttttattgaacgatttgatttgttcttacagctgacctggacagtccagcaatttgcctgtatgctcggatcctttaaaggcgcccatatcgggttaacggaaatctttcatctgaaaaataaaaacaatgcatggctgctgactgcaatgctggctgcgacgtttttcataacgatgtatcccaaggacttgaatgacgtgttttattacgggacgcttcttggatatgctttcttaattgtgattacaattccattcttcgtctggtttttaagctggatacagaaaaaattagggagggggcagctacaatgaaaacagcaacaaaattctccgtcatgttttttatgctgctggtcctctgcgggtgctgggatgtcaaagatatcgagcaactatccttcgccagagggctggcgatcgatgagacagatgatcaccagtacaaactgacgtatcaaaaccttcttccccaaagcgaagacagccaagcatccggaaaacccgaatttgtcaatgtgacgtcccacgggaaaacgattctggaagcagtcagtgatgtatccatcaaggaccctcctgtttatagcgatcatttaaaagtcattcttctgggagaaaaactgatgaggaatcaaaatgtagaccaagtcctcaaccactttatccgagatgatgagctgcggcgaagcagctatttgatggcagccagagggaatgcagctgatgttctcacaaaaggaaaccccaatcagcagcagccgatgccctccgaaaaactgattgatttgacaactcacagcggatataacggtaagattatgataccgctgcgcatcggaagagcttctgtctactctcagaacgggtacagttatcttattcaagccgtgaaaaacgaaaagggaaaagccaagtatgacggagcaggcattatcaaaaggggcagcaataaactcgttgggtttctttcagctgatgaaacccaaacactgtcatgggtcatggggacgatccaaggcggtgtcatgccgacgacagataaaggacatccgattacgtttgaaatcaaaaagtcgaaaaccaaaattaagcctatcattgaaaacggaaagcctatctttcatatttctgttaaaacgaagggcatcctgacagaagaccaaaacccgaatgaaaactcctttagcaaaagttatttgcacaggctggaaaacatttttgaaaaaaagcttgaacgagatgtaaagcaggtaatggataaactgcagcacgagtataaaaccgatccggtctttttatcagaccacataaggattcaacaccctgactactggaataaagtaaaagggcattgggatgaaatattttctgagactgattttaagtacgatatttcttttaaaatcattaactttggcacggtgggaaagtaagcaatcaaaagggtgcgcatgatcgcgcacccttttttatgttccgacagtctgctgttttccggccgatcctccctgtccgtttttgtcccgtaaatcctgctcaatttcttcaaggctttttccctttgtctctgtcactttaaatcggacaaataagaacgccatgataccgatcgcggcataaatcaggaataaataactgattccgatcgcttccattaatattggataggttaatgaaacaatcagtgtcccaacgtgcaacattaaggtcgaaacaccggtcccgattcctctgacgtgaagcgggaacaattcaggaagcatcacccacacaaccggtccccagctgaccgcaaagacaacgataaacacgcctaaacaaatgacggtcgtccatgaggcagccggagtgttatcgaaaaagagatttactaaagcgagaacgatcaagctgatcaccatgcccgcattcccgaatagcagtaacggctttcttccaatcttgtcgataattttaatcgctactaatgtcatgagaacattgactgtgccgattccgaccgtgcctaaaatcgaagcggagtttccgaatccgacgtttgtaaaggtctttggcgcatagtagatgatcgtattcgttccgataaattgctgcaaaaaagcgagtcccaaacctgcaataagcgctgggcgcacccatggatcgaacagctccttcaggccgccttcatcctgcttttccgcttcttttatatcatgtatttcctgatcaatatcttttgtgccacgcaatttttcaagaatgttcttcgctttgctttcttcgccattcgtgaacagccagcgcgggctctccggcataaacaaaatgccaataagcaagagcaatgacggcacagcagccaatccaagcatccagcgccacgcttcggcatcggcaaatatgtaattgacaatgtaagaaagaaggatgccgaccgtgatcatcagctgattcagtgatgacagcgccccgcgtttatgttttggcgccagttcagataaataaaggggcacgattgtcgtcgatgttccgactgcaagtcccaaaatgatgcgaaacagcaccatgactcctgtatttggggccagtgccacaccaagaccgcctatacaaaacagcagcgcggctgccataattgctttttttcttccgaaacggtcagtcagcttgccggccgctcctgagcccaatatcgccccaaccagcaaggagctgacaacaagaccttctgtaaacgcgtttaagcctaactcctttttcataaataaaatagctccggaaatcactccggtatcatagccatataacgcgcctccaagagctccgaaaaaataaagccatatatttgactgctttttcataaagatgactccctttctccatcagctgcaatgacattgtctgtgggatttttttagaaatcttttagcctctttttccggccattaaacctttttattttgctgatcataagttttccaatcatttacttgtatttttttcaatgtcgccgaaacattttacctgctgcggcgtccaatataaggtgattcagtacatcatcgttatcaattttcaaaaacaagaacttataaatataggaatatttatcgaaaaatgtctttcgagtagttgccccatggcaaatagaatggtacgcttcaaatattaaagaaacgtgaggtattgatatatggaagaacgatcacagcgcagaaagaaaaaaagaaaactaaaaaaatgggtgaaagttgttgccggattaatggcttttttaatcattgcggcaggctctgtcggcgcctatgcttttgtaaagctgaacaatgcttctaaggaagctcacgtcagccttgcacgcggagaacaatctgtaaaacggatcaaagaatttgatcctggaaaagattctttttctgtattgctcttaggaattgatgccagggagaaaaacggcgagaccgtcgatcaggcaagaagtgacgcgaatgtgctggttacatttaatcggaaagaaaaaacagctaaaatgctgagcattccgcgtgacgcctatgtaaacatcccaggccacgggtatgataaattcacacatgctcacgcttacggcggcgttgacttaactgtgaaaacagttgaagaaatgctggatattccagtcgattatgtcgtagaaagcaatttcacggcttttgaagacgtcgtaaacgagttaaatggcgtcaaagtaactgtaaaaagcgataaagtcattcagcaaatcaaaaaagatacaaaaggtaaagtcgttcttcaaaaaggaacacatacgcttgatggggaagaagcgctcgcttacgtaagaacacgtaaagcggacagtgaccttttacggggacaaagacaaatggaagtgctgagcgccattatagataaatcaaaatcattaagctcaattccggcttatgatgatattgtggatacgatggggcaaaatttaaaaatgaacttatcccttaaagatgccatcggcctgttcccgttcatcacttcattgaaatcagttgagtctattcagctgacgggttatgattatgaacctgccggagtctattatttcaaattgaatcagcaaaagctgcaggaagttaaaaaagagctgcaaaacgatttaggtgtataatgaacgggatggcgattacgccatcccgttttacatatttccttgttgaaaattatcaaagtaacgtttagccttaatttatatggattatgtttcacaggcaagctgaacatactacacgaagcagcttcatttttaaggaggttcccctacatatgaaatgtattgcgattgatctagacggaacattactgaataaagaaagcgtcatttctgcggaaaacagagaggcgatcaagcgggccgttgatgccggcatcctcgtcaccatttgcacgggaagagcgacatttgatgtaaaagcgctgctggatgacttggacatccctatcattgcagctaatggcggtacgatccacgacacgggttaccgtttgatcagccggacattaatggatcaggaagccggtaaagcgattgctgattacttactttcaaaaaacatttactttgaggtatatacagatgaccatctgctttctccttttgacggcgaagctaagctgcacgcggagcttgacattctaaagagcgcaaacccaaacgagcagacggatgaattgtggcagggagccatgactcaattcaaacagtttggcattaaaccaatccctcatatcgaatcggtttttgacggcggtgaaaacatttataagcttctttgcttctcctttgatatggacaagctgaaacaagcgaaggaagaactgaagcatcataaaaaactggcgcaaacctcttcaggaaaacatattatcgaaatcctgccggcctcgtcaggaaaaggacgcgcgttaacaaagctggctgacctatacggaattgaaacacaggatatctatgcgatcggcgatagtccaaacgatttgtccatgtttgaagtcgccggacaccgaatcgccatggaaaatgcgattgatgaattaaaagaaaaaagcacctttgtcacaaaaagcaatgacgaaaatggtgtggcctactttatagaccagcttctttcaggacaatatgcataaagaaaagactccagagattggagtctttttcttttattgcacccgtatacttcctgcgtatttatccttccaatatgtgctcgtgttcatattggtgatggtcacgccgtttgataatgtaacgtgaacaacttgtccgtttccgatatagatggagggatttaagcttgttgattgaaagaacacaatgtctcccggcttcaggtccgccttctcaatcttagttccggcattgtactggcttattgcgtatcgaggcagggaaataccggctgctttctggtagacatattggacaaatccagctgtatcaaatcctgtctcaggtgttactccgccctgtttgtaaggcacttctccgacataaagcgtcgcttcggaaacaatcggattttctttcgggattgtcaggttgtcaaatcggcgaatacccgtcatcttcgatttccagtaatcctctgacaaataggaaatggttactttttctgaccggcttgcctgaatgaacctgcctgcgcccgcataaatgcctgcatgtgaaattcccgttttatacgtattgctgaaatagacgacatcaccaggctttatgttctgaggggctaccttctcgcccactgcccactgctgttcggctgatcgcggcagataaatgccgagtgcctgttgaaacacatattgcacaagccccgagcaatcaaagccctctgacggcgtgcttccgccaaacacatatgggacaccgatatatttttcggcctcctgaacgacaggaacatcagccgttgccggatcggcagcgattcgtctcgccccgatataagttccgctccaatagctgctttttttgtaattggtgatgataaccccttttgactgtgtactgtgaaccatttggccgtctccgatataaagggcgtcatgtgtcggaacagtgccggtgcttccctctttcttgaaaaacaaaatatcacccggcttcaggttttccggctttacagctgttccgattttatactggtcgtttacagatctcggcagatgaatatcagccttactgaacacatattgtatcaatcctgatggatcgaaaccctcttttggcgtttccccgccatatttatactgatatccaagcaggttttttgcttcactgacaatcaattctgatgatgtatcagcttccgcaatctccgcttttgtcataattggaaccaaaaaacaaatgataaccgccacaagcaaaaacttcttccagtttgccagtgtgttcacttttattatctcctcctctttttgcagttttaacatcggtatttttttgaatatgttaagagactttttaatatttttacagaatgaatatgctgggcaaataaaaagagagtgtctcctcagacactctcttttttgaattatttattggcgtttaccggttcttcctgctgctggattttattcatttccatatcaatcttctgtttttcctgatctgtcagctgatcattgaatttaaaagctgacataaacatgaacacgatggctacggcaacaaacggccagatggctttgacaaatttcatctttatcactccgtttatttagattttagtttgtcactatgatcaatatcaaacgtcagttttccgtcttctactttccaagcgaaattagagtctttcgtcagttcgcgaataatggttttctgtttaaggctgtcttttttcacaggtgcaggtgtcgcttcatggatatcgatcggtgtcacttcaaagcggcctgttccatttttcttcaggtgatactgaaccagtgcactgtctcttgttctcgtccagccttggtcaaagacaaagttgccgaggctgtagaaaatgacggttccgttatatacttcaatcggttctaagacgtgcggatgatggccgacgatgatgtcagctcccgcatcagacatggctcttgcaagctggcgctggcggtcgtttggatcattgtcatactcttggccccagtgtgactgcacaacaacgatgtccgcatgttttttcgcttctgaaatcatagggatgaagatttcaggatctgcgggcagcacgcccggcgtattctttttagccgcgaaacctttcccggacacatcggtaaagccaagcgttgcaattgttaccccgttgactttctggtacgaaattttctttttcgcatcacttaagctgtatcccgctccaacgatatcaaggttttgcttcgcaaattctccaagcgtatctttcatgccctgaacgccgtaatccattgcgtggttgtttgcgctgttgagaactgtgaaattcatgtccttcaagactttcactgattccttattcgtctgcagatgaatctctttatctgcttgtttataattcttttgataggttaccgggttttcaaagtttcctgctacataatccgaagctctaaagatcggttcaacatattgaaaaatactgtctgcccctttttgctccgttactttttcaacatagcgtcccatcataatatcgcctacaaatgaggctgaaagtacgtcgtcagaatacgttttgaccttcggcgtttccgcttttcccgcccacatgaaagcgaacataaggacaaaaacgatcggaatggcaataaatacgtgcttattggttttctttttttgctgttttgtcagctttagcagcttttcatgaaagctcagttcttttttcatcgtttgacacaccttacattaaattaagtagtaaacaaacatgatagcaaaggtcgctccgctcaatagcagcgtgcttccgaacgtaatggttaaaccttgtttctgaatggtattggcaattaaacctggcacgatgatgccgattcctcgaaattctgcgatttcaaatggtacaatcgggtatagaaaatcaaacgcgatttttaggacgatccctgttatcagcatggcagcgaattttctgcgtccgtacaaaatcataaatttggataaaccgtatttcacgataacataagtgagcaagctcactagcaaaacaagtaaaataaagaccggctgattaaacacaagtcctaaatatcccggtacaacaagtcctgccggcacgatccctgttttttccgcaaaaattaaactgagtagtacacctaaaattagtgcgatgtataaatctgatccgaacatgtttgcatttccccctagcttacgagctgcttaaccttgtattcgtggattttttcaattaaaggctctgcggcaccatgaatattgccgacgccatatatgacacggttgtgcattcttttctttaacaattccataatttcatctgttgacttatactctagatcatgcagtttgtctgcaggaattttgccttcttcgtaggcttttacgaccggttctgttgtttcaccgattaagatcagttcacttgcttcaatataaggcaatacgtcatttgcgaattgctgtgtccgatcgacacggtctgcgcggcagttcatgatgatgatcggatcatcggtcgggtaaccgatttcttttacacgtttccatatattcaaagtagaagaagcgtcgtttgcggcaaacccattaacaaagtgcccaggctcgctcggactgatcagcggaagaattctcattgctcccggatctggcggcgcattcagcattcccttaaatgctgtttcttcgtcaatgccgagtgcttgagccacacccagcgccagagaagcgttatcagggaataccatgtattcaaatttacgtaaatactcatctgtaatttttgagttatcagcaatgatgacttttgtgtttcgttcttttgctttttgtttaaagaactcggtatattcactatctgtaatgacaagatggccattataaggaattgtagcagtaaacgcttctgcaatttcatcaagcgtcggccccatgacatccatatggtcttccaaaacattcacaatgacgccgatattggcctgcagaagttcttcctgaaagatgatttgataatctgggttaacagccatgcattcactgacaatcgcgttagcccctctttctactgtttctctcatgacttctttttgctctccgatattcggcccctgaggtttccgtttaatcggcttttcctccggtgtgtcccagtaaatcattcttgcatctgttcctgttgtttttccaacagtcttgtaaccggcttctattaatattccggttgtcagccttgtcacagtcgattttccgcggatgccgttaatattcacccgaacagggagggcatcaatgtttttctgatgtcgtcgtttttctaatattccgatgaccagtatgacagcacaggctataatgagtaaccacattgcttttcgacatctccttctatattgttgtaaattcattcatcagtatatagaatcactatgaattctcaatcggcattatgtaacataatcttccctaatcgactaagccaaacttctcttttgaaagagattttatacctacaaactgttttctatttttggaaaacagcaggacttataccttatcacttttttaaaaaattgaagagaatgcgctttcatttttctcctgatatccttctggacgtatagtcacaccctgctgtttgtatttaatatgcatttcaaatcaatctttttttcagcctgtgttatcaagcatttcctgctatcatgcgtgtttccggttcttatgaacacaaaataattttatcctgtttcttaaggacaaggtcataatgtcatcctttctgcatggaataagcaatatgaggcccattccaaaatgactaaggaggttcgagatgaaaacgctaaacatacgagtccgaattctctaacataattaaacattttctgggatgatagtcttttctgtttctcaccatttacaggtctaaacgcatgactttgaaacaattttaataaaacttaatatttgttcaagaaatcttcatccatatttgtgaagactttgtcaaaaaaagagtgaaaaccttaaatttttcaattatatatacaatttacaagtagatttcttttgatatttttattgctaacttcggattgttcatgataatctatatatgtaaacggttacataaacaaggaggagctgttttggctacaattaaagatgtcgccggagcggcgggcgtttcagttgcgacggtttcccgcgtcctgaatgataatggctatgtacacgaagaaacgcgaacgcgtgtcatagcggcgatggcgaagctgaactattacccgaatgaagtcgccagatctctatataaaagagaatcccgactgatcggacttttgctcccggatatcacaaaccctttcttcccccagcttgcccgcggtgcggaggatgaattgaaccgggaaggctatcgtcttattttcggcaacagtgacgaggaattgaaaaaagaacttgaataccttcaaacctttaagcaaaatcatgtcgcaggcattattgccgcaacaaattacccggatctcgaggaatacagcggcatgaattatccagttgtttttctggacagaacactggaaggggctccttctgtgtccagtgacggctatacaggaggaaagttagccgcccaggctatcattcacggaaaaagccagcgcattacgctcttgagaggacccgctcacctgccgaccgctcaagaccgctttaacggcgctttggaaatcttaaagcaggctgaagttgattttcaggtcattgagacggcttcattttcaattaaagatgcacaatcaatggcgaaggagctgtttgccgcttatccagcgacagatggtgtgatcgcgagtaatgatattcaagccgctgccgttttacatgaagcattgcggcgcggaaaaaatgtgccggaggacattcaaattatcggctatgatgacattccgcaaagcggacttctgttcccgccactttctacaattaaacagcccgcatatgatatggggaaagaagctgccaaactgcttttgggtatcatcaaaaaacagccgctggcagaaacggcaattcaaatgcctgtcacctatataggaagaaagacgacaagaaaggaagattaagatgcgtaatatttgtgtgattggtagctgttctatggatttagtggtcacctcggacaaacgcccaaaagccggtgaaacggttcttggcacgtcatttcagactgtgccgggcggcaaaggagcaaatcaggccgttgccgcagccagacttggggcgcaagtgtttatggtcggcaaagttggagacgatcattatggaacagctattttgaataatctcaaagctaacggcgttcgcactgattatatggaaccggttacacatacggaaagcggaaccgctcatattgtgcttgctgaaggcgacaacagcattgtcgttgtcaaaggcgcgaacgatgacatcaccccagcgtatgcgttaaacgcgctcgaacagattgaaaaggtcgatatggtgctgattcagcaggaaatcccagaagaaacggttgatgaggtgtgcaaatactgccattctcacgatatcccgatcatactaaacccagcaccggcccgcccgctcaagcaggaaacaattgatcacgctacctatctgacgccgaatgaacacgaggcttcgattttattccctgatcttaccatttccgaagctctggcgctttatccggcaaagctctttattacggaaggaaaacaaggcgtccgctattcggctggcagcaaagaggtgctcatcccgtccttccctgtagaacccgttgatacaaccggagccggtgatacgtttaacgcagcatttgccgtggccctggctgagggaaaagacattgaagccgcattgcggtttgccaatcgtgccgcttccctttctgtctgctccttcggggcccaaggcggaatgccgacaagaaatgaagtagaggagctgctttcatgaaaaaacacggtatactgaacagccatcttgccaagattttagcagaccttggccacactgataaaattgtcatcgcggatgccggactgccggttcctgacggcgttttgaaaattgatctttcactgaagccgggtcttccggctttccaagatacagcggcagtgctcgctgatgagatggtcatcgaaaaagtcattgctgcagctgaaataaaagcatccaatcaggagaatgcgaaatttctagaaaatcttttctctgaacaagagattgaatacctttctcacgaggagtttaagctgctgacaaaagacgcaaaggcagtcataagaacaggagaatccacaccatatgccaactgcatcctgcaggcaggtgtacttttctagaaaggaggatgaaacatgcagattgaaatgaaagacattcataaagcattcggaaaaaatcaggtgctgtcaggcgtttcctttcagctcatgcctggcgaggttcacgcattaatgggagaaaacggcgccggcaagtccacgcttatgaacattttgacaggcctgcacaaatcggatcatggtcaaatcagcataaacggaaacgaaacgtatttttccaatccaaaagaagcggaacagcatggaatagcctttatccatcaggaactgaatatctggccggaaatgaccgttcttgagaatctatttatcggtaaggagatatcctccaagctgggcgttttacaaacaagaaaaatgaaagcgctagcaaaagaacaatttgacaaactctccgtctctctttctcttgatcaagaagccggcgaatgttccgtcggacagcagcaaatgatcgaaatcgcaaaagcgcttatgacaaatgccgaggtaatcattatggatgaaccgaccgcagcgttgactgaacgtgaaatcagcaagctctttgaggtcattacagcgttaaaaaagaacggcgtctccattgtctatatttcgcatcgcatggaagaaatttttgcgatttgcgacagaattaccatcatgcgtgacggaaaaacggtagatacaacaaacatctcagaaactgattttgatgaagtcgtcaaaaaaatggtcggacgggagctgactgaacgatatccaaaacgcactccttctctcggtgacaaagtattcgaggtgaaaaatgcctccgtaaaagggagttttgaggatgtcagcttttatgttcgttccggtgagatcgtcggtgtttcaggattaatgggagccggccggacagaaatgatgagagcgctgttcggcgttgacaggctggacacgggtgagatatggatcgctgggaaaaaaacggctattaagaacccgcaggaagccgtgaaaaaaggtctcggctttattacagagaatcgcaaggatgaagggcttctgctcgacacctcaatccgcgaaaatattgccctgcccaatctgtccagcttctcaccaaagggtctcattgatcataagcgggaggctgaatttgtcgatctgttaatcaaacgcctcactatcaaaacagcatcaccggaaacgcacgcacgccatttatcaggaggaaaccagcaaaaagtggtgatagccaagtggatcggcatcggaccgaaaatgcttatcttggatgagccaaccagaggtgtggatgttggcgccaaacgagagatttatacgctgatgaatgagctgaccgaacgcggcgtcgctatcatcatggtgtcatcagagctgcctgaaattctgggaatgagcgatcggattatcgttgtccatgaaggcagaatcagcggagaaatccatgcgcgagaagcaacacaagaacgaattatgacacttgccacgggagggcggtaatatgaaaacggaacaactgcaaacagaacaaaaacggattcacttcgacggagtcatgcaaaaactcggcccgtttcttggtttatttattctcgttatcattgtatctattttaaatcccagctttcttgaaccgctgaatattttaaacctgcttcgccaggtcgccattaacggattaatcgcgttcgggatgacctttgtcattttgacaggcggcattgatctttctgttggcgctattcttgccctgtccagtgctttagttgcggggatgattgtgtccggtgtcgatccggttctcgcgatcatccttggctgtatcattggtgccgtactaggcatgatcaacggattattgattactaaaggaaaaatggcgccctttatcgccacgcttgcgaccatgactgtgtttcgcggactgacgctagtgtatacagatggaaatccgattaccggacttggcacaaactacgcttttcagatgttcggacgcggttactttttaggcattcctgtaccggcaattacgatggttcttgcctttgtcatcctttgggtgcttcttcataaaacaccattcggacgccgaacgtacgctatcggcggcaacgaaaaagccgcgctcatttcaggcatcaaagtgacgcgcgtgaaagtgatgatctattctttagccgggcttttatccgctcttggaggtgccatattgacttcccgcctgcattcggcccagccgactgcgggagaatcgtacgaacttgatgctatcgcggcagtcgtcttaggagggacaagtctttctggcggccgcggacgcattgtcggcactttgatcggggtcctgatcatcggcacacttaataacgggcttaatctgcttggcgtttcatcattttaccagctggttgtcaaagggattgttatcttaattgcggtattattagaccgcaagaagtcagcttaggagggttttcacatgaaaaaggctgtatccgtcattttaacgttatcattatttttgttaactgcctgttcgcttgagcctccccaatgggcaaagccgtcaaactcggggaacaaaaaggaattcaccattggcttgtccgtctcaacacttaataatcctttttttgtctcattaaaaaagggtatcgaaaaagaagctaaaaaacggggaatgaaagtcatcattgttgatgcacaaaatgattcatcgaaacagacgagtgacgtggaagatttaattcagcaaggtgttgatgcattattaatcaacccgactgattcttcggcgatctcaacggcagtagaatctgcaaacgcagtcggtgtgcccgtcgtaacaatcgatcgatctgccgaacaaggaaaagttgaaaccctcgttgcttccgataatgtaaaaggcggtgaaatggccgcgacgtttattgccgacaaacttggaaaaggagcaaaggtggcagagcttgaaggcgtccccggcgcatctgccacacgggaacgcggctcaggattccataacatcgcagaccaaaagctccaagttgtcacaaaacaatcagctgactttgaccgcacgaaaggcctgactgtcatggaaaacctgctgcagggacatcctgatatccaagctgtttttgctcacaacgatgaaatggcgctcggtgctctcgaggcaattaacagctcggggaaagacatattggtgatcggttttgacggcaataaagatgcgctcgcttccattaaaaacggaaagctgtcagccaccgtcgctcagcagcctgaattaatcggtaaattggctacagaagcagcagatgatattttgcacgggaaaaaagtgcaaaaaacaatatccgcgcctctcaaactagaaacacaaaaataattgtctgatgtttaggaacctgcgataacgtgaatagagatatagaatgaattatttctcttacgtgaggagaggaacggcatgaacaaaccaacaaaactattttcaacattagcacttgcggctggaatgactgcggcggctgctggcggcgctggcacgatccatgctcaacagccagaaacaacggtaagcattgatgatttatacagttatccgattgattcttatttggtatcagcagaggctctaaatgtcagaacgaaggcttccgcatcaagccaaaaagccgatacgctgcacttaggagatagcctaaagctgatttccttctcaaatgctgactgggcaaaggttcagtataaaaatggaaaaacaggatttgtatccactcattacattgttaaagcagcgacaacggtaaaaaccaaaacaaaaacaaaagtatatacatccgctgacggaaagagcattaagactcttccagcagacacaagcgtttcttttttaggctggagtaaaacgaataaaggcggttttgattttgattgggtattcgttgattacggcggtgcgacaggttatatgaaaacaaaggatttacacatgacaaaataactgagagggattccgcatttatgcggaatcccttttattatgaattgatttgtcacattcccaagatatttctcaggaaatattgtcgtatgctgtgtcgaaaccttacatgatcatcaacatttttgttcacgctaaaaagcggaggtgtaaatatggatcaatttgaagcagcatatgaatcgtataaagcccggcaaacaactgtcgatcaagaaaatgttccatctggaaaagaagaaattattgcggttagaagaaatgaggaagacaatattatcgcagtgaaaaccaatacaggaagagagctcgactatcctactgcgctgtcagaagcaaaatcaggaaaactcgctcatgttgatgtcttccataaatacgggcgtgacattttgcgaagtgaaccggacggcatcaaggaaaataatctgtctgagctgccggatttttaaacaaatacagccctgccgtatgttcgacagggctttcttttaaacaaaaggctgctgaatgtattcggctaaccgttttgcactgtgtgaaatatcctctgcagctgcataattcacgccatagaacacatatggaggcagatacttcatgccgatcagattactcgtggcctgaaatggtttcaatagctcactgatcgagtaatgatttgctccgcccgcttgatatttttccgcttcgctccctgttgatacagccagcatcagctccttgccatgcaaggcatttccttctgaaccaaaagcccagccataagtcagcacaagatcctgccattttttcaagagcggcggagagctgtaccaatatagcgggaattgaaagacaatccgatcgtattcctcgcacagctgctgttccttcgcaacatctatcgcttcatccgggtattccttataaagatcccgtactgtgatattgtcatgtttactcaattcctcagcccacgccttattaacaactgaggtctccatatgaggatgcactgccaaaaccaatattttcatcagaccacacctttactgttttgatgttattttatctaaaatcaggaaaagagccaaataaaaagaaagccctgctaaaaggggctttctttttttcttttattcagggcttccttcagttgtttcgatatctttcgcaaaatcagggttatccagattcgcattaaagaaatccgctgtgttcggaagtctgagattcatgttcattttttgagaaatcgtaaccgtgcaatcctcaagcacatagtcaaaaacgtgtccgcctgaattgcgtccttcgtcaatgaagtgcaggtgatagccagaaacggcgattccgtttgcataagctggtgtcaagaaacctacaatcgttcctctcacgttgtcgaagttgaaaatcggctgtgttttaaccgcttcaaccattggcacgtaaggtttttcttgaagttctactgttcttgtctgcacctttttaaacaatccgtcaatgcgaattgcataaaataagtttctgcttggcagcatgctgttgatctctttttcaaagtcttcgcgtgtcattttcgcatcaattttgtgcgtcatgtccggtgtaaagaacgtaaatgaacagaacggtgaacggtctccattttggaccggtgtcgcggttccgtctgagcgaagacggtaaaattcgccgtcaaacccaatcagctctccgtcaagcttgttaaaggttccgataccgaagtctccatatttcggaatctctgacagttcaaaatctccgtcatatactccgtctaatagagaagtcattgttgatacttgataaatctggctcacaggctgatctttttgaccacggctgagcacttgaatgttgctttctcgtttcatatttcccttcactccttttatttagtgctgttcataaaacagtgtcgtgatgcgcagagtgctagagagcttttgttttcataagttccccgaattctttcggaagcttgtcacttgctaaattaatgttatcactgtagtcaaccgggacatcgatgatgacaggaccttcagcgttcatgccttgacgcagaacatctgccagctggtctggtgattctacgcgcaagccagttgctccgaagctttccgcatatttcacgatatcgatatttccgaaatcgaccgcagatgtacggttatattttttcaattgctggaatgcaaccatgtcatatgtgctgtcgttccatacaatgtgtacaattggtgcttttagtcgaactgctgtctctaattccattgctgagaataagaaaccgccgtcaccagagacagaaaccactttttctcccggtttcaccaatgaagcgccgattgcccaaggaagcgcaacgccgagtgtttgcataccgttactgatcattaatgttaacggctcgtagctgcggaaataacgtgacatccaaatggcgtgcgaaccgatatcgcaagttactgtaacatgatcatcgactgcattacgcaactctttaacgatttcaagagggtgcgctctgtctgatttccaatctgcaggcacctgctcaccttcatgcatatattgttttaaatcagaaaggattttctgctcacgctctgcaaattctactttcacagcatcgtgttcgatatgattgatcgtggacggaatgtcaccgatcaattcaagatcaggctggtaagcatgatcaatgtcagcgataatctcgtctaaatggataattgtccggtctccattgacattccagaatttcggatcatattcaatcgggtcatagccgatcgtcagaacaacatctgcctgctctagcagtaaatcgccaggctggttgcggaacaaaccgatacggccaaaatactgatcctctaaatctctagaaagggtaccggcagcttgatatgtttcaacaaatggaagctgaacctttttcaaaagcttgcgaaccgctttaattgcttccggtcttccgcctttcatgccgaccaaaacgacaggaagttttgctgtttggatttttgctatggccgcactgattgcatcatctgctgcaggaccgagttttggcgctgcaacagcacgcacgtttttcgtatttgtgacttcattcacaacatcttgcggaaagctcacaaaagcggccccagcctgccctgctgacgctattctaaatgcatttgtaacagcttccggtatattttttacatcttgaacttctacactgtattttgtaatcggctggaatagcgccgcattatccaaagattgatgtgtccgttttaaacgatctgcacggatcacgtttccagcaagcgcaacgacagggtctccttcagtgttcgctgtcagcagacctgttgccaagttagaggcacccggtcctgatgtgactaacacgactcccggttttccagttaaacggccgactgcttgggccatgaatgctgcgttttgttcgtgccgggcaacgataatttcaggtcctttatcttgtaaagcgtcaaataccgcatcaatttttgcacctggaatgccaaatacatgtgtgacaccttgctccactaagcaatcaacaacaagctccgcccctctgtttttcacaagggatttttgttcttttgttgcttttgtcaacaccctcactccttattatgcattttaaacgtaaaattttaaatatcttgtgataagtttcactatacactctttggaaattgacctccaatatcgattcgccttatgattaatatgtaatacgaattattaacctatggaaaggaatgcatattgaatggagcttcgccatcttcaatactttatcgcagtagccgaagagcttcatttcggaaaggctgcccggcggctgaacatgacgcagcctcctctcagccagcagatcaaacagctggaggaagaagtcggagttacgcttctgaaaaggacaaaacgatttgtcgagcttaccgcagcaggagaaatctttttaaatcattgccgcatggcattgatgcaaatcggacaaggaattgaactggcacagcggacggcccgcggcgagcaaggccttctcgtaatcggttttgtcggatcagctacatatgaatttctgccgccgattgtccgggaatatcgtaaaaaattcccatctgtgaaaatagaactgcgtgaaatatcctcgtctaggcagcaggaggagctactaaagggcaacattgatattggtatacttcatcctcccttacagcatacagctttacatatcgaaaccgcccaaagcagcccttgtgttttagctttgcctaagcaacacccattgacttctaaggaatcaattacgattgaggatttaagagatgaaccaattattactgttgctaaagaagcatggcctactctatacatggattttattcagttctgtgaacaagcgggcttcagacccaacattgtccaggaagccacagaatatcaaatggtgattggtttagtcagtgccggaattggtatgacatttgttccttcctcagccaaaaaattatttaatttggatgttacttatcgaaaaatggaccaaatacagcttaatgcagaatgggttatcgcttaccgcaaagacaatcataatccgcttataaagcattttattcatatttcaaattgtcagcagacaagaactaaagagagtgatgcaggtacatgaacaatacttgcaatctcttttttcttttgggattcttatggaatttttattaatttaatataatcgcttagtacaactttatatcagtatacgtatacatacagtacaaatagttggcaaggacatcagtaagcgcaggacattagtttgattttaaaaatgaaagatagagaggtgaagtaaattattgagttcaccggcatattcacattgctcgcttttttcgtaacaatgatttttattttctggagaccaaaaggactaaatgaagctatccccgccacatttggcgctttaatggttttattgtgcggaagtgtgtcattggcagacttaggggaaatcggaacaaaagtcacgggtgcatcggttacaatccttgccactatgattatggccattgcactagaaagctttggtttcttttattgggtggctgcaaaactgctccaacaatccaagggttcaggcatcaagcttttttggctaaccaatttgctctgctttctcatgaccattttcctgaataatgatgggagcattttgatcacaactccaatccttttgcttgtactaaaatatttaggtttaaaaaaacatcaaaaagccccatatttattaagcggtgttttaatagccacagcctctagcgcaccgattggcgtaagtaatattgttaatttaatttctctcaaaatcattggaatggatctatatcttcacaccgccatgatgtttgtccctagtatgatgggactcatttttatgacttgtctactgtttatgttcttttataaacgtcttcccaagaacctgccagatataccgggccattttcagtctctgcggcatagaaggtaccatcctcttcattcgccatcagctcctttaccagaacgaaatcaaacaaaaatcatgttgtttgtgcttgcatttgtttttctcgtcagaatgagtctatttgcagcatcatataccggtatttctgttcctctagtcgctgtcatcggatcttttatcctgttgagctggagatggatttatttcaaaacctccccaagagacttgttatataaatcgccttggcacatttttatattcgcttttactatgtatgtcttaatttatggtctgcataatattggattcacagagttacttgtgaattattttgaacctgtggtttctggaagcctcgcccatgcaactttcgcatcaggtatctctacttcagttttttctaatctctttaacaaccatccagcgttaatgatcagtacttttaccttaactgaaatgaccctgaatccttcaacaacaaaaatcatctacttggccaatattatcggcagtgatatcggttcattattattacctatgggaaccttagcaacgcttatttggatgcatatattaaaacagtatgatgaaagtatttcatggggcgaatatataaaaacgaccattatcatcattccgctgactgttctttttacgttaacatgtttatatttttggatcagttggttatttctttagcacagtatgaaacgaaaaactgccttctgctattcaagagggcagttttgcatacactagggaagatgcattgtctttagatgatttaacttccaaatgattggctctccatttgcgttaataagctcaatgatattattagagacatcctttaatagaccaactttttctggcacctctcccatatcaaatatgaccaattcaccaatattttttttgatctgctcctcaaaattacgcacaagaggaactttggaaggcatgacaggcaattgtgagttgtcaagagtgtacggtgtttgttcagttgaataaggggtaaaccattttaaatgatgcatagatataaaaagtattttaaatacaggtgagaaaaatacaatataatcgtttaaaacatttgtaacatacccatggatcgatcgacccccagttacataaacttcaataaactggcctttgaccttgtttaatgtatttctatatgaaaaagcttgagtttctgcctctatggatggatcttccggattgatcaaaaatggcttctcagtactggtcattattttcgccttgtttatttgatgaagatgcaacaagggaatataaagataattgcagccatcaaaaataacaaaaatatcctgtccgatatctatgagggtgccgacaaaccttgtatctcctgaaatgacaacctcaacatctgtgttaaggaattgattcaaacctttcacgattctcctcctttaactgaaaaagggcatcacttaatctgatgctcctccattatctattaaaatttacgtttccagtgatagtctatcgttctgacaatcgtttcatagctataatcatccttttgtttttctgaacttttgaaggaacttgaataacctggtgatcttgatgattgataatctgatgatcttggtgatcgtttagatgattttgatgattgataatctgaagattttaatgatcgtttagatgattttgaagaactttttgaacgtgacgaacggccagatttggatgattgataatccgaagattttagtgatcgtttagatgattttgaagaactttttgaacgtgacgaacgaccagatttggatgattgataatctgaagattttagtgatcgtttagatgattttgatgagctatatgattttgaagaaatgaacgaattgctgtccttatcattattgtcttcctggctttgttcatttttttgatcctcttttttgtacgacccttttggtcctaagctgatgctttttatgtgaaaaggatagatgcgaagcacctcttgatttttcactatagtataatggccgtcggcattatctacaaggataccctcaatggcttccggacctccacgattaattgaaacccatttatgagtcagactcttaaaaacctcgcttaaatcatcagcttccaaaactccaactggcgtctgctcttctattttcaaatcaggctcgtgtttacttatacttttgatgtgatggatattaaaatacactaccccatcctcatttgtgtttaacgcagcgtaatcatctcccagccagaccaatcttccttttttagattccggacccccttggttaaattgaactgattggtttattaaatgtccgattaagctatgaaaatcatcagcatcgagcatttcctcagtctcaattgtcgtggtgctattattggtatcctcagtaatacttttcacatgctccaactgataataaattatttttttttcagcttgtaaagctatataatctgattttacagctgttaattttccttttttagattccggacctccacgatatacagtaacaattttatctttcattgagtgcaaaaagttataatacgatatttcattatttgaatgatatttcattctcctcttgctcattcaaattcctcctagtcacttatacatagatgataaacatactgcatatatacgtgtcacatttatttgttgaactaattcaatagcctaattgtcgctttttccgcgaatacccattttcacgcattcataaaatacttaaatgatctttgaggtattgtgaacggtttttaatatactcgcagatcacatccggctcacggtcaaaacgctcaacatcattctttttatatgggtccatcaagataaaaggcctaatccgttcatacatcgccatgattttcggttccatatattctattgtaaaaagagattggagcgttttttctaacaggcgcttgtaggacttgcgaaactcggattcatccaatatccgggcggttagtgtattaaatccttgaattcttacataatcggcagccatccgctctccatggatatccctgccccaagtcgcatcataatcccaaggaatcacctcaaataatccggtttccccgcttctgtataatgcgtagttgtggacaaacccgtcatagtttgaggtgaatacaataccggcaagccagcgcaaatacttgtcgacatccacgtgttttgtcacttctgacttaaactgagctttagggaccgtattaattttaaaaatcatatcctgtaaataaaaatcatcctcctcagtccctgttttcttttcatatccaagctccagcgatgttttcgtttccctttctaaatcgctcatcagagaaaagttggcatcatcatccaccgcataaaaaatcgcgccatcagccagcttccttttcgccaaataatattcatctacggattcaagttcaagataaaccccttcattcttcccattcatctttacaaacacaaactctgcctttggagacagtgtccctagctccgagaaaaaatccagagacaatttgtttctcatcaaggaaggatctttatactccgcatttaagtgaatctctcgcgcgccgcggaatgttttcggctgataaaaggaaatatggtatgacttctttttgaagtctctgatatgtgatccccgataagcaatatcaatatccagccttttttgatttaccttcatcacagctggcaccggatcatcgtcccatatatccttttttaattcacgcaagtcttttggatgaacaaacagctgataaagcggtaaattggattgattcttcatccataatcctccttacaaattttaggcttttatttttataagatctcagcggaacacttatacactttttaaaaccgcgcgtactatgagggtagtaaggatcttcatccttaacatatttttaaaaggaggatttcaaattgggccactattcccattctgacatcgaagaagcggtgaaatccgcaaaaaaagaaggtttaaaggattatttataccaagagcctcatggaaaaaaacgcagtcataaaaagtcgcaccgcactcacaaaaaatctcgcagccataaaaaatcatactgctctcacaaaaaatctcgcagtcacaaaaaatcattctgttctcacaaaaaatctcgcagccacaaaaaatcatactgctctcacaagaaatcacgcagccacaaaaaatcgtaccgttctcacaaaaaatctcgcagctataaaaaatcttaccgttcttacaaaaaatctcgcagctataaaaaatcttgccgttcttacaaaaaatcgcgcagctacaaaaagtcatactgttctcacaagaaaaaatctcgcagctataaaaagtcatgccgcacacacaaaaaatcttatcgttcccataagaaatactacaaaaaaccgtaccaccactgcgacgactacaaaagacacgatgattatgacagcaaaaaagaatactggaaagacggcaattgctgggtagtcaaaaagaaatacaaataatctaagttttcattgtttcaataggctgccggcggaggtacggaagcctatttttttatttgccctgtattagatatatgtcatgacataacatatgcaacccgcatcatttggtttcctttaaaccatttcgttataatcaaggtatcctaacgataaaggcggttgttgctatgtacatatttcaagctgatcagcttagtgccaaagacacatacaagctattgtcaggtaccgttattccccgccccattgcatttgtgacaacactttcttcaggaggagcggtcaatgccgcgcctttcagtttttataacgtcgtcagctcagatcctccgcttctcagtatttctgttaacaggacggaaggacgccaaaaagatacagcgcgaaacgcagtggagaacggagaatttgtcgttcatgtcagtgatgaagccatcattgaagatatcaatgaaacagctgcaagcttaaggccggatgaaagcgagcttacacgcacctcgcttcatcctgttgaaagcaaagctgtttcagttcccggcattaaggaagcccgcgttcgctttgagtgcaaattagagcggcatattacctttgacaatgatcaaggcatcactacagcagatctgctcatcggaagagttgtctgcttccacctagatgaaaaggtgtatgatgcagaaaagggatatattttaacggatgaattaaagcctgcctcacgattggcgggaaatcactatgccaagctgggggaagaattcacactgattcgtcccagctgaagagaaggactatttaaatagaagaaactagtcaaaaagaccttatgattacaaaatatcgcctgtaaataactgaaaaaatatcaaaaaaaagaacacccagagcaagctcggggtgttcttttatgaaacgtttttcctttttcttcgtataaaggtagattaggaggaattggaatgacaaacttttggattttaatgctgatcgctattaccatcagtctcgcctctcaattttttataaagaaaaaatacggtattgataaatccggctggcgatataagcatgtcagcaatacacacaaatggatcgaaatcactttacttattttgtttgtgttttcactctccttttttccagttgaatatttgcttcttttattttttattgtgattgactcaatacgaatttttatggagtggcattatagacctgaagataaacagtatatgtaccacattgtagaggtctcacttatgtttatgcttttgatttatatttgtaccctatagttatttaaatccccacagccgctccgtctccccgaggatcggctccgccttggagaaagccttcttcatcaactttgattgcagccgcttgtcccatcagcggatcatagtcaccgacaacctccacgagatgcccgctgtctttcagtttttggattgttttgtctgtgaatctgccctcgactctgagaccttcgtattcctctccccacgttctgccccatacccagcgcggttcgctgattgcttgctgtggatgcattccgtagtccagcattcgggtaatgatggccgtctgagtctgcggctggccttcgccgccttgtgtgccgtacagaatttttggctttccgcttttacagaccatagccggcatcaacgtatggaaggtgcgctttctcggttcaagcgtgttgacatgattttcatccagtgagaaaaatgatccgcggttttgcagtaatatgcctgtatcaccggctgtgactgccgagccaaattcaaagtacaggctttgaatgaatgacactgcgttgccatccgcatcaattacggccgcatatgccgtatcacttcccaccggcctgctttctgccggttctgccagaatgccgatttctcccgccaatcgtttcgcataatttttatccaaaagcctttcaagcggaatgtcagcaaacgcagggtcagtcaaaaaggcattccgatctacaaaactctttttcagcgcctccacaagcacatgataatactcaaatgaaccgtgctcgatttgggtgaaatcatagttttccaaaatgttcagtgttaataaaccggtaaatccctgagaattcggcggcgcctgatacacactgtatcctcgataatcacttgatacaggctctgcccactcaccccgatgcgctttaaaatcatcgattgtcatgtaactgccgttattctgtaaatgtgagacaattcgctgagcgagatctccttcataaaatgcgcttcttcctttttcagtaatcaagttcagactgtctgcaagctctttttgcacaaaccgctctcccgggacaggcgctttgccccttctcgtgaagatgtcagccgtgtaaggcgtggaagccagcagttcaatattcttttctgtgtgacgacactgatcagctgatacaggaaacccattttgggcataatcgcgtgcgggctccaatacatctgcaagagacagacgcccgtactccttcaggaccgcatcccagctatcaaccattcccggcacggtaatggcactgtcaattccccgcagcggaatcgcgctttttcccttatatacatctctcgttacgttttttcctgaacggccgctgccattgtagacttttactgcctttgtttcctggtgaaaggtcagccaaaaggaatccccgccaagtccggtcatatgcgggtacacaaccgcaagacaagcactcaccgcaacagcggcgtcaaacgcgttgccttccttatccagtatgcggtttccggcttgagaagcgaggtaatgcggactgacgaccatttgctttgtaccgatgacagatctgttcatcacaagtccccttttttaagaaattttcttcagtatagggagcctgatttttcacatctactgatccggcagaaaaactgacgaactttcttcttttcgcaaataacaagatattttcgcattcatttcgaaaacaaatgaaaaattattatttcgatacgtaacttttatgataaaatgattgctaaaaggctacgaaagcaggtggagcaattgagtcatgaatatcaaatccccaaccttgtacttgatgagactgataaacaaattctcacgattttgcatgaagaaggcagaatttcttatacggatcttggcaaaagagtcgatttgtcacgggtcgccgtccaggcccgtatcaaccaattaattgaagccggtgttattgaaaaattcaccgctgtcatcaatcccgctaaaatcggcattcatgtttccgtgtttttcaatgtcgaggtagaaccgcaatttttagaagaggtcgctcttaagcttgaggaagagcctgcggtcaccagcctttatcacatgacaggcccgagcaagctgcatatgcatgggatctttgccaacgatcaagaaatggaagaattcttaacaaaacggctgtatccattgcgaggcgtcgtcagtgttgattgccagatgctgatcaaacgatacaaaagccgtatgggaatgaagctgtaaaggagagaaacgaatgaaaaaccatccttatcgggatatgacggccgcaatggttcgcaccggcatattagggttcggcggcggaccttccgtgattccgctgatccgccatgaagcggtcaataaatataaatggattgacgatgatgaattcggagaaatattagcaatcgctaatgcgcttcccggaccgattgccaccaaaatggctgcttatctgggctttaagctaaaaggcacattaggtgcagttgtggcgaccctcgcccacattctgcctacatgtcttgcgatggtgggcttgtttgcggctgtaaatgtgttaagccattcagcaattgttgcaggtatgatcggtgccgtcacgccggtaattgcggtaatgctcggaatcatggcgtacgagtttggccaaaaagcgcttaaaggtttcggctgggttaccggcatcctgttttttatcatcgcttttatcggcctgcaaactttacagattaatcccggcctggtcattatcattttcttagcgtacggggcgtttcattttaaactgaaagacaaaatcacaaataaacattcaaaagataaaggaatgtcagcctcatgatatcgatctatttatttatggcgttttttatcgcaaacctactgggatatggcggcggacctgcgtctatcccgctaatgtttgaagaagttgtaaacagatacagctggctctcaaacgatcaattctcaaacatgctcgcacttgcgaacgctttgccgggcccgatcgccacgaaaatcgctgcgtatgtcggctacagcgcaggcgggtggcccggcttcctaattgccctgatcgcaaccgtcgtaccgtcggcgctcgcattgatcgtcctgctgcgcatcatccagcgcttccgccaatcacctgtcatcaaaggcatgacgctgtccgtccagcctgtcatcgcggtcatgatgctcattcttacctggcaaatcggcgcagacggcatcaaagcgatcggctggatccaatcgatcgtgattgcgggaatttcgctccttgccatgacaaaattcaaaatgcatccggcatttttgattatcgcggcgtttttatatgggggccttgtgatccctcatttatagaaaaaagcacctggacaggtgcttttttattttggcccagaaatgccgtttgatatgacagctgtttcttctcctgcgtcactcttgatgatgtgcttgacttgcagcgtggttcctgccattctcacagattgcttcaactcggacgaattggtttcaacttgtatccaaacaggaggctggaccttccaaaataaatagagtgcaagaatcagcaagccagcaatgaccgacagcaaaaacttcatatcgcatcgcttcttttcagtaagcggcccgcagcggacagcgcctgatgatcacgaagaatatcgcctggacgattgccttctcccagcacatagcctttaaaggacattcccataaaatgaaaaatatgttcgaattgctgaatcagcggcagcccttttatttttggattgtctccgcccactgctattacatatgcctgtttcactgacatttgctgtttaaaatcaggaaatctcggatctctcaacgtctgtgaccagcgatcaataaacagctttaatgtccctgacatgccaaaccaataaattggggtggcgaatacaagaatatggcactgcaatatccgttcaatgatagaatcgtagtcatcttgaacaggacgaaagccgccttgggcgtgacgcagatcttcaattggctgaattcgatatttctgcaaataaatgtgctccgcatcgaatccttgaacagccttctccgcaagaacatccgtatttccgccagaccgagttccgccgttaataaccgcaattttcatgatgcatctgctcctttgtttacgaatgattttcttcatcttataatggattcatctatcaatacagatgattatttcgattaatccaatcgctaaaaccgatttagaaaggaagagaacaagtggaattgaagcagctgatcacctttattacggcggcagaacatgtaaacttcaccctaaccgccaaaatgcttaattatgcacaatcaagcgttacctctcagatcaaatcacttgaagaagaaattgggacgcctttatttgaacggctcggcaagcggcttatcttgacagaagcaggaaaaacgttcaaatcttatgcacagaagatcattgcgttaacagaagaagcgaaaatggccgcaaatcaagtaagagaaacaaccggaaccttaaaaatcggggcgacagaaagccagtgcacataccgcctgccccctatcataaaagaatttaaacaggcttttccccaagtaaagctcatattcaaaccatatatctccaatgaacaagcgaaagaacagctcttacagggccagcttgatatcaccttcatcttggatgtaaaccggatggaagacgcactgcacgttgaatctttgattcaggatgagatcaaaatggtggctgctaatgaccatccttttcctgcggatttaccagtaacattgaaggatcttcaaaacgaaactcttctgctgacagaggacggctgctcgtaccgcacgctctttgagaacaatttgcatgactccggtgtctatcctaacaaattggaattcgtcagcatagaagccatcaaacaatgcgtgatggccggacttgggattggaatcttgcctgaaatgacagtaaaagatgatattgcagcaggccggatgaaagaactcaattggcagagcgattgccccgttttcactcaattagcatggcataaggacaaatggatgtctgcgccattaaaggcttttatcgatttgacacggaaaacattcaaataaaacctctccacaaggacgacaaggtttttgagaccaggaaagcacacacatacaaaaaaacacttgatgacttagagccccaagtgttacatgtgatttttctgataaaacgttcgcaaaacatgcgtttcaaggtcagccaggcggacagggattggcaatctgctttcttgattgatcaagctcatcgtgatctgatagctgctgtctaaatcaatataattaccgcaagacaagaaaataggcttcacgtccccccgcgttcgcagcgcccggccatatacctcgccgtcaatgagaatatcggtgtatgcaccgacttcattttcaggcatcacgaaatcatagcctttgattttgagataggttttcgcaatcccaatcgtcggcttgcccagaaaaaaagccgcatgggtggcaacgcccatatgattgtaatgcagatatccgttgccatcaaacaagaagacatccggctccgtctccagctttttcgccgcctcgatgatcaaaggcagctcgcgaaacgcaagaaaaccggaaacatacggcacgctgattctccccatgctgtgcactttttcaatgacttcttttgtatcagcgtcaatcacgataatactgcacactccgtatggttctccgttctgctcccaataggcgagatcgacgcctgcgcaggtgttgatggagttgggatggatcgtgtgggataggttgatacgatttctaagggattgttgtgtttgaacaaaatccgattcatcttttagatgaaaatcgtgtatttgatgtatttccattttacttgtttccctctcttcgcgctcaattgtcctgcatgtcgattctagcaatgacaccaaattatatcattgaaaaaagcagatagtataatctgcttttttattactattcatttttcatttctttcataaaaatataatccaattgtttaattaattctttaagttcagtacacataatatcctctaaaggattttcccaatcttcgttttttatcagttcaatcccatagcttccggctggatcaccttctgggtaccaccctacgtcaagcagcaaattttttgtcttatgagaaatctgcaggagatcttgattaaagtcaaataaccaagcatcgtcatttgcctctagcgtcttaggatcagtatcctttaatgtaatataatcaacagtccaaccagccggtatctttagccttaaaaaattgggaatctgttggcttagtggctgtaaaccctctaaaaccccgcttcccacactccagatttgatattctaactcttctaataattgttctatctcattaaaagactcatcttcataaatcttatctgtttttaagccagctactttgatatggtattgattattttcataacttaccttaataaaggccttacgtttttcattttgtagtattagtaattcacatttttcttgcattcttttttctgaacataaattgttcagtactacagaccagccattacagatttttaatggctgcagttgagaaatatggtctctttccatcccgcttctccttgcactccatattgttatactatctataaaaaagcatgccgatgacaacacggcatgtttttaactatagcaattctaatacatcagagtaaacaaggcatctcctaatgttaatctcctgttgaaaggctgtatatgcggcaattcactccactcatacacagtatcgtagtaatcatacaaataactgagttcaataaaccctttctcttgcattattttattaatatagttcgttccctgaatgaattctaaagattcagcggtgcctacaatatcataaacgccatcgattaaatcgtgtcttagggaataactataatctaatacataaacaggaaccaatttagatactttcatattgatttgctgttctaaatgaaaaccattttccccagaaagatcttgcaaatggatatcaatttctcctgaaggattgtttaaatctctaacttcaatttttttcaaaccttttatttgattaaattcatcaggtacttttattttctctgcgcatttgttcttgtaccattcgcctaattccctattcacaaatagacgataaagcaactcaccaatttcaggatattcattaataaacctgattccatgttccataaatagtaaccattccatcctttaatcaagaaaatctaaacttcattccaccaagtagttgttacttgttttaaatgatattcaatatataaaatcacttttttatagtcatctgatgaaaattctttaataggatcttcccaatcattatctttgactagtaaaaccagataattaccttcaggagaaatgtcaggaacccagcctaaatcaagcgttattgaggattgttcatgataaagctgcaacaaactgtctgtgaacaaaaaccaggaatcatcattcggttctaatgttcttggatctatttcaacaaaatgattataatttactttccaaccttgtgttattcttaagggatgtatattagcttttggaacatctaatttaacatgttttctcatttatataacctctttagagagccgttattcttaaagtctgtttttagataacttgtcaaccaactatttgagtgggagacctgaaaggtgaaaatgtagattatgaataatatttacttagctgtacgaacttcattttacaaggctgccccttgcatctatattcatcttactaattatcttatagatcagtttcaatgcaaaaattttaagtttaaaaaacctcgagaggcaagcgccaatcgagggaaggttagtttttttctacttacttgttaaaggattaaaactgatattcttccagaaaaacgttatgagaacattagctgcatctcatattatctttcctctctgcacaagtgattatattcaccaaatttagggaaatcatcccagttgctcttaaggttgtcgctagtctcacgctcttcgaccgaaccggtcttgaaatctgtcttctccattgctatatgaccatcttcgcgaaagcctaaaatcaaactgctaacttcattatcagttgcatcatcatattcccaatacattgctgttcttaagaagattttaccatcacttataacttcaaaatcataattcagatacttacgagtcaagtcatcataaaaacccactgaaacccatttatttgttacatttacaacatatttaggtttttcgccttcggttaataccgcagtatatggttcatgtttttggtgatgtaagtatgcggtacaatcatcaagaatattccaaggctgtttttttatgtccgaccattcatcacaataataaactttcatagtcaattatacaccttcccatttatatccctaataataatcctattttttgttgcttcatcaagaattttttgtggaatagctttattttgaacaggtacttctaatatcaattcacctttcagtcatccgcctttaagagcttttggattaaaaggaccatttgatattttagaccctgaagaatattttttagtaatctcgttcaagtaactcagtgctgtcttttcttgaacgtcactaagttgagtatacttcctggaaactatctccttatttggagaatatgaatcaactacgtactttttgccgcctgcttcttttgcttctagctctacttcattataagggtaacgggggcgattttccttattgaaattatttcctgcttcccaccgttctttaagccaagacggtaatggattcttattagatgacttccccgtacccttaatacctttaccactactaaccatcttcacaatcccaagatccttaacagccgtcttttccacatcgacacgtactgtcgggattccgaatgtaaagccatccggagttacagggcgttctgcgtacacgtggacgtttgttgggactttgaattgttttactttctctagtgttttgtttgctttttggacttttgaatgggttgcaagcgggatgcctttatcaatatgtttcgccagtgcaccggctccaaccaaactcagcacagcttccagcgccccctgcttccgcttctcctcagacactttgtttccaaacatatcccgtcccgtgacggcttctgagaatccgtttgacgcaacaaggccgtatgcacccatttctgtcattttgagaatgtctaaggatttgcctgttttgtaggcgtctaaagcgtgttcagccgcgatagcagcttttccggttttgtagatggcttttccgcctttgaaggcgcggcctgcccagccgacgactggtataaatcccacggctgccatggtgccgactgtgacgcgttcaaagcctatacttatttacgctatataaaacagtggacaacaaactaataaaaaaaccttgaaaggcttcagtgccaatcaaggtagaaaatcaaaccaactcgaagcgtttatttgtttttaataatgccttaagattttttaacaatactattaattccttcaaatataatatctctcataacttcattattactgttataatttctttcatttcttattttattaaaaacctgctttataaccccatcaatcattattgttaatccttctatatcttcttcactaccctcctttttaaaactttcatttattattaccaagctatcatcttttgacattttattttctcctttactctctttctttctcattaaaaactttgtctatataatttacttcatcaaaaatccagtatctatcctcttcaggaatataactagtaaagtcttcccgaacccctgtccaattattaggaacataattttcaaaaggtaataactcaggatacagcgaaagaagcattttttgattaaagtctatatataatgatggccttaattctagaatagtactttcataatcctgatgttcaactaacttctttaattctgaagacgggataatatagtcagtatattcttttaaataaagacgataattatcttcatttacaactgaaatgttatttcttagagaaagagcaaagtccatatcaaaactaaacccgtttttttcataggcttctttatatttcatgatatctagtatccaaacatctctttctgttagataccatgagaattgagaagaagtctttaccccgactattatattttgggcatactccggttttaataacaacgaaaacaccactttctcattctatttttttggctgaatgcccatattcctctaaccactctatccatggttccgccggaagttcataactaactcccggtgtcgtaggatcaacaagctttggagcagttctcccctggttacgagggtttttagtatatccatactgatcaattactgtctccttgattaaatcatcaatctctttaggtaccttaaattctacaatttctccgcctggtcttgctacatctcgataatatttagcgtgttctaaattgtaagcacttatgtttaaatcagcatttttaataggaatagcaatgcttccatcactatttactttaattctatactgacttgttttatttcccgctcctcctccttgaactctgtaataacttactgattgttcgacaggatcgacagattttttacttgattgtaacttatcattatttactttcttcgtatataattgtttcttctctggctttaagtcaaatgtatggccagtcgaagtaacaatctgttctttatttatatgaccactttgcttaattttagaaaaagaataactcttatcaagatttcttcccatcgatagcgtattgtcaaccgacttcgccaatgcaccagcaccaaccaaactcaatgccgcttccagcgcacccgttttccgcttctcttcagacactttgtttccaaacatatcccgtcccgtgacggcttctgagaatccgtttgacgcaacaaggccgtatgcgcccatttctgtcattttgagaatgtctaaggatttgcctgttttgtaggcatctaaagcgtgttcagccgcgatagcagcttttccggttttgtagatggcttttccgcctttgaaggcgcggcctgcccagccgacgactggtataaatccggctgcggccatagctcctgctgtcacacgttctgcggtggagagtttttctccggtaaccggatcaacgccttcagttgctcttttataatcataatagccagtgacttctccagtaaagttgcaaactccatcccatgttttttcgtaccatggtttgtttgcttcttcctcggctttttcctggagacgtcttgcttctgcttgctgggcttttgcatcaatataggttgttccttgattttctacttcaatgacgcttttgtagacttcattgctgtggaaggcttttttgtcatagtacataggggatgcgctcttcccattgctggtggcctgcatgagaacagaatatttggtgagcactgcgttgtccagagattctaaattttgatattcagtggtcagggattcatcaagcttatcgacagctgtgatcgtgtcacgtctgactttttgggcatcgcccatcttatctgcatactcgtcaagcgtgtacatgtcgaggtcaataatatcgctgatgcctgacaaaatagaatcgatttcttctttatgagcggagactatctctgaggctttcaggtctccattgggcagctcatgatccaaaaatgaagtttccacatatgaatcattcagttcttgatctttaatatcgcctgaaatgccgtttaaaaatgcaatttgagcagagacaagcgtcagccagctgtcgacgatttccgcctgtccctgaaagaaatctttaatattgtccgcgccttttcctttaaaattatcgcctaaatctgcaactccctgaaacgcttttttcagcgtattcagctgctcttcaagcgtctcatattgcttttttctgctcttcgcttcttcgattaaagattttgattcaaatactttactcatcgcactgccctttctgttctattttaccgctatcgcctcgtcctgctctttaagtgaatctacgttatcctttgtatcctcgatatttttctgtaccgcttttttgtaatctccgagcatggttttgatgttctcctcacgctcatgatattttttcgtataatcgagtttattttttccattggaccccgcggcgccgattgatacgtcagcaagcgcatctttgacagactctaatgttttgattacagcatcgtatttcaatttaatttctgacataaaaaagatcaccacaatttaatagatttaatttgattaacagcatcctccaagaattcttcacccttagcaagagtatgaccagcaaaattcgctagctttaattctttgtcatagagaaatttcatagattccaactgaataatctccatctgaatcgaagccatatactcgttatatttatcattcacaatcttagatgcttccgatttcgcctcttctcttcccttgtcgaaatcatcggcttttgttcccgtccaatgcttgcccaattctggttttacaatttctttgatttcagtgattgcctcttcttgcagtgtgtctatgtccttttttgcttttttcagcttttcgatcttgtcttccacgtcggaaatttttccgttgagcgaacttttgatatccgccagcatactttcataacccatctgaatcacctcttaatactcaaaaagtcgtatggaggggctgatgaagatagacttttccatactttatttccatatattatattttaaaatagccagaaggcggcttaaatagggtaaatggcttaatttaggcatataacgctcttgaaatgtaggtatttgatcttgtttttgttcgttatacagctaatgaaaacgttttttaaaatgaaatcacctaaagtcatagttataaaggcacttgaaagaggcagatgttgttgatctgcctcttacggcgctgagcttattgttcatgtttatgttcttcatcaggtcggccacgtctgattttgtctttggcttctattattccccgcttctgaccctttggatcaaaagcttgtattagctgcagtcccagttgtacagaacgtttgaaaagtcttttttccttagatcgtcaggtgtgatgaaaaaattggcgatgccgacgtctccccacattgaatcgatatcatcgtctgaatcaatttgtaaaagcatgatggtgtgttctttatatgcgtattcccgtggatcatgctgggtaaaagaagcgtatccgccgattttatggccaaatccgttttcagccagttcattataaatgtcttcttcatcctcgccgaactgaccaaagaactccattgtttccatgcccgtatactgctcaaattgaaaatctgtaggcagcacccattccgaagatttcacaggctcgactgccgcttctgataaaatcggaaaatcacattcgcctgtgccaataaatgaaaaatcagaaacaaggtcgtcttcgttttctatgatattttcaaaatagatcactctgaaattcttttgttcacatcgatcgtcaaaattcaatccatagacgtcatcatgaagagaaatgtagaactgcaggatacctgaagaaggatagccgtcaagctggggaatgtgcgagaaattaatctgcgccagaagcttcatcggctgtccatattcgtcagtcggatatgtttcatgcttggggaaatagggatcaccggcaattttgctgtcatatcgtcctgttttcccttttctcacattcagtttcacgtattctttcgctgatttctccagcaagtcgcggtacggtctcattttttcgggtagatgattcatcagattctctccttttccggcatctccaaggttttattttctggttttcttcgtttcttctaatgtttttcaaacgattgtttaaagaagccctacttctgtataattttccaaacaatagttaaatagtagcaaatgtattcagcaccccgcaatagatgaaaaaaagactggtgcgcaaccagcctttctttttcaactattgaattgcacctgacggaacaaccgccttccgtccgacagaataatactccactcctgcagccaaagcctcatccaatgtgtagcagtttctgccgtcaaatatgagcggcgtttccatcaaatcctgataagccgctaacgggaattgtttaatgtcagcccagtcggttaaaatcatgacggcgtcagaccctttgacagcttcctcgatcgtctctttatattcaacagcttgcgggagaacatgctttgcatggctaactgcaatgggatcgtaggctctgatacgggcgtcgagcgcagcgagacggtctgcaataacaattgacggcgcttctctcatatcgtcggtattcggtttaaatgacaggcctaaaagggcaatcgtttttcccgtcaccccgccgagcctgttcagcgctttatcaaccagcatcgcctgctgattgttgttgactttgataaccgatttcagcagttcaaaatcatgctcgacattgccggcaatttgcacgagggcgtttgtgtcctttggaaaacaagagccgccgtagcctatgcccgcttttaaaaactggctcccgatccgcttatcctgtcccatcccgtatgcgactgcttcaatatcggcgccgaccttttcacatatattcgaaatttcgtttataaaactgatcttagtggccagaaaagcatttgaggcatatttgatcatctcggcgcttctgatatccgtttggtatatcgggatttgaaacggacggaagagctcctccagcgtatttgctgttttctcatcggccgtcccgatcacgatcctgtcaccatgaaaggtatcatagatcgccgacccctcacgcaaaaattccggattggatgcaaccgaaatactgacaggctccgctagatgttcagtgatcagtccattaatcaaatcgtttgtcccaacgggcactgtgcttttcgttaccacgactgtatctcgtttgacatgctttgcgatgcgtttggccgcatctgtaatttgctccagattggcgtgcccgtcgcttttctgcggtgtgccgaccgctataaaaatgatgtctgcctgtgccaagcctttctcatagctcgtttcaaagttcagccgtccatcagctgtattttttctcatcagctcttcaagacctggttcaaatatgggggaaatgccctttctcatttcatcaatcttgtgagcgtcaatatcaatgcaggttacatgatgtccaatctcagaaagagaaacacctgtcacaagaccgacatagcctgttccgatgactgttatattcattgtttccctccaacagttaaattgctgctttgcagcttccgtaatatcgtatgagaacatcctatcatgaatgcgaatgatctcccgcatagcctgtcgggtacagcctgtacagatttctgaaatgtgattcaatcatacaatacactattatatcgctctcaaaaagaaagtggtgaaatgagaatcggctgttaaaaaagaccaaacaattttcttcttttgaccggttgcggaggctgtctgaagatggtctgattccgcaggagaagctctgcattttccgtcagcatataaggaagttccgagccgaattctttctctagaacataaagggcctcttgagtgtgaaaatttctcgttttcacattatgggcatctgaggctacgaaatggatcaaattggcttcaaccagccggagagaaaatgctttcagctgcttgccgaaggtccccgcaagacttcctgaagtaatctgagatgctgctcctttttccacaagatgatacagcaaggacgggttttcgcgaatttccctgttgcgttcaggatgggcgataaccggaatatatcctttcagctgcaaatcataaaaaagctgctccgcatatcggggaacgtgatcaaacggaaactcaatcaagatgtgttttgtatcattcagcgaaagcagctgctgtttggcaaggtcttgttccacctcgccgtagattctgatttcctgtcccggaagcacatgtaaaggaatgtcttctttgattaaacgtttgtttaactgatctgctgcttctctgactgcagctggctcgtttttatacacaccgttgttatgatgaggtgtcgcaatgatcgtccggattccctgacgaacagcggctcttgccatttctatgctgtcggccgaatcacctgccccgtcatccattgcgggaagaatgtgacagtgaatatcgatcatgtcctagcccccttttttcgcaaaaataaataacgggcacgatgcacgttatttattttgcatgaaattgtccttgtttccgtaatatccgtattcagagtgcttcgaaagctttttgccgttcataatcgccccaagaagcttgcttttgcacgtttcaagcgcctctttcgcttttgcggcttgttctttttctgttttcccgcttgaaataaccagaacagaaccgtctgccacgttgcctaaaatctgtgcatctgctacggcaagaataggcggcgtatcaaaaatgaccatatcatatgccgcacacgcttcgtatgcaagctccttcatccacttcgaggagagaagctcggccgggtttggcgggatcgggccgctcgtcagcacgtcaagatgtttttcattcgatgcctgtacagcctgctccatagagcttttctttaataaaacagatgttaagccaaccgtattttcaagaaaaaaggccgtatgtactgttggttttcgcaaatcagcatcaatcaggagcactttttttccctgctgggcgaatacgacagccaggttggcggccgttgttgattttccttctccgggacaagccgatgtgatcatcactgatttcatctggcggtccactgaagcaaattctatattcgtgcgaatcgtccgatattgttcagagttcaaggatttcggctctgtcattgcaatgacatttctccgcatccgcgagtctctgctttttctaagcgccaaaatgtccactccccgttttttcagattggaaaccctgtaaggtctttgctgttttctgctcattcgcaatggtggaaactgtccctaaaacaggtatgtccagcaaggattcgagctgctcttccgatttgatcgtattatccaaatgctcgagcaggaaggccagtccgatgcttcccgccaatccggctgcaaacgcgatggcaatgtttagtagcggctttggcgatacaggggacggatgttctgaaacctcggcttttgacagaatgctgacattgtcaacattcataatggatgtgattttgtcttgaaaaacagatgctatagtattggcaatatgagccgctgtttccgcgttttcatccctgactgatatgttgaccacttgggagtcctgttcgctggatacggtaattttgtcattcagttcttgggatgtcatcgacaggcccatttctttaatgacttcatctaagatggcaggacttttaatgatgacattgtacgtattgattaactgaagattggtttggacatcgttaaattgaacttcttttcgttcatttttcgattggttgaccagaatctgagttgaattttcatagatgggtgtaagtgcgaagaaactaatgagtccgccggcagcagtggcagctgcggttacaatcataatcaaaagtatgcgttttgttaacgttgataatatctcttttaagcttgtagattctcccatgatacctccaaatctcttataacatccttttccatctacgattatacaacgttgaaaccgcatttctccagcttttcacgtgacataattcgacatttttttacaaaacgaaatgttactcttttttatgtaagcgctatatttactgtgttgacagcgctgtctcattttctcttattcgtgcagtcacgtaacctcgcataaaaaaatcccgcaaaaggcgtgcgggatttttatgttgcatatccatttttaatatgagaaatcaaattttcaagcatttccttcgtcgtcatctcagatgactgctcaccaatttcatgtgcatgcatcaaaattttcagaaattcttcttgattcaatttcttttcactcatcttttttttcctttcagcttccattaagttgaaaacacgattattatatgatgctggttatcaatttgcaatctctaatacatcattcgacacatcccattttttatgtccttttttaggaaaaactttttaaggccgatgtgttgcgatataatagagaaattggatctttttattacgtgactcggttaggagcgataatcatgcttcagaatatgatttccaaagacgatgtgctggcatctgctgaacagttaaaagaacttcttccttacaatgaggaaaatgttcagctgatcaaaaaagcccttattttatatcggcaggattcagtctatcgtttacaagcagtgagtccgacggaagttacggcttacgtgcaggatgttgtgcctgtgcgggtcacattgaacttgtttgtcatagtcaaaagcggctgttcatgtccgtccggaagaatctgccgccatatgctggctgtgtttttatatgtatatgcaatgttcgagcgagtgggtacttttacagagcattggctggagagggaaaagcttgaggaaagcaaagagctcgtccgccgccagtttcaggaaaaggtgctgcctaatgaagaatcgctttcaagctggcttgctttttttgattcagagttttctctctggcaggcacgtacgccagaaggcagccaaaacatgcagggcctctattacggctacctgtccgcattaaaaaaacatgcgccgaacaagccggagctgaaaagcctgtatcagattcattccgcgattgcggtttggcttcgcatgttcacattgattgaagcgggcaagctgaaccccgaacaagatttttattccctcaatccgtacgttgaacagctgatggatacaatctacagctctattgacaaattaaaaacgtacgcgctgtcttttgcgcttgatccgtttttggataaaacaccggatgttatccgacctttgctgttgaaagaagaaattttccaatatgaacgcatccgcgtcttcggtgaaatttggagtgcgctgttgtcgcggccaaaatgggtggcacgcgaacaggagatattgaaaaaagaagctggacggcgtttttctcccgaattgcaattcgggcgcctgcatttggaattcctgcaaaagaatgatgacgttatttttgcggaagcggatcaattcccgccggaagcgctcccttatacgttccaatggctgagtgaaatgactgccaagaaggactggaaacggcttaaaacatggtaccagcaaattgagccaattgcgatgggttatacgaagctggataagccgtttaaagagattcgcgatgtgatcggcgagctgttccttctgttgaatgcctatgtgcagcaaaccaatgatcaagcgctgtttgagcgctttgccgcgggctgtctgccgtatacgttcacagaatacagccatcatttatatgaaaaaaaacgctatgccgagtggattgaaattcatagccttgtcggcttttccatcaatgaaatggataaaatgatgctcaaggaaattgcagcgagcgaccctgaggcgcttataccggcttaccatagagaagtggcttttttcattgatcagaagaaccgcagctcgtacaaggaagccgcccggtatttgaaaaaattgcgcaccctgtacaaaaaagcgaaaaagcagaaggtgtgggagcggtatattcagctgctgagctcgcattacaagcgcctgcgtgcgcttcaagaagaactgcagaaaggaaagttgattgatggcgagtcttaaagaaattctcatccacgtcgaacaaatggaagatgggtcatttacgctctcagcctttgatgaaaatgagcagcctcttccctacagccatatgaaaaagcatttgttccaatggcatgaatcctcattttacggaacctttctagaggatgtcagcttcatcgggacgactgctgtcctgctatcgccatggatgactgtagagcttctcggcaaaaactcgttcaactcattcagctccgtgcagcttacagaagaaacggagccgctgatcgaggcggcatcgaccatctatgaatttatcgcggacggcgattttctgcctgactatgacgcatggacaaacggtgtttttcgctggaaagaccgcgataatatactggaaggctttactgcggaatggttttccgctgccgtacaggattacatccagtacgacgatgacctgcgggagaaatgggaacatatcaaggaaaaatcgcctgcggttacgacattccgcggccattttcttgatgaagaggattttctggaaggcattggctggattgacgatcaatctccatttactgtcggcttgcgcttaaatgaaccggactttgacggagacgaatggaagatcgagatgtttttacgcgataaaaagagcggcgctgtagaattctttgacggactgaagagcctcaaaaaatcgtggcaggcgtacagcgataaaatcgcgcgtgagcaggaccgctttcacagaacggttccgtggctgtcgtttgattccgggacaacgctgatctcggaggaagaagcctggatcttcctgtcagaagcaagtgagacgcttgtcgatatgggggtagaaatcctcctgccgtcctggtggcagattgtcagagacagcaacatgatgctgaaagcaaaggtgtcgtcctccccgcgcggcgagtcatttgtcggcatgaatgcactgcttgatttcaactggcggttcgcgacaaatggaattgaactgactgaggctgaatttaatgagcttgtcgccagcaacaggcgccttgttaatatccgcgggcaatgggttaaaatcgatccgcagtttatcaaacagatgaaacgcctgatggaaaaagcagaatcagagggactccacatgtctgatattctggcgcgcgagctaatggatcagcaggatggcggacttgaggattcggacctgattgatacatctgcttttgccggcattcagtttgatctgtctaaacagctcaggtcactgattcgaaagctcactgccgcggaaaacctgccggagcacgaagtcagtccttctttcaaaggaacgctccgcccttatcagaaatacggcatgaactggctgctgtttctgcgggaaagcggttttggcgcctgtctagctgacgatatggggcttgggaaaacgattcaaatgatcgcctatttccttcacgtgaaggaaagcggccggcaaaaaacgcctcatttgattattgcgccgacatccgtacttggcaactggcagcgggagcttcaaacctttgcccctgatctgtctgtcgcgctccattatgggccgcgccggccaaagggtgatgatttcgccgcgcattatgaaaacgcagacgtggtgctcacttcatacggtctgtcacatgccgatactgaagagctttcttctgtgacatggaacacgatctgccttgatgaagcgcaaaatattaaaaacgcgcatacgaagcaatcacgcgcaatcaggaagctgaagggtcttcatcatatcgcgctgagcggcacgccgatggaaaaccgcctgactgagctgtggtccatttttgacttcatgaataaaggctacctcggcagtttgaccggcttccataaacgctatgtgctgccgatcgaaaaagaccgggacgaaaagagaatcggacagcttcagcaattaatccggccattccttctccgccggacgaaacgggatgaagaggtcgcgcttaatcttcctgagaagctggaagaaaaagaatttatcccgctgtcagccgagcaggcatccctttatgagcagctcgtcaaagacacttttgaccatatgacgtccctgaccggcatgcagcgaaaagcgctgatcctcagcatgcttggacggctcaagcaaatatgcgatcatcccgcgctttacttaaaggaagagcaaaccgagctgctggccggcagatcagtcaagctcgaaaaattgctggaactgatgacagcgatccgcgcccaaaacgaaagctgcctgattttcacgcaatacattcagatggggaacatgatgaagcggctgcttgaaaaaacgttcggggaacctgtgcaatttttaaatgggagtctctccaagcaagagcgggatacactcgttgagaaatttcaaaggaaagaatatccgacactgattctctcactcaaagctggaggcaccggacttaatttgaccgccgccaatcacgtcatccattatgacagatggtggaacccggcggttgaaaatcaagcgactgaccgtgcataccgcataggccaggagcgctttgtccacgttcataaaatgattacgacgggaacaatcgaagaaaaaattgatgtcatgcttgaatccaagcaaaccctgaacgatcaaattatccaaagtgaaaactggattaccgagctttccacacaggagcttgaagaactgtttacattaagcgctacagcgcaatgatcatgactaaaaaagctggctctgatagagccagcttttttccgttcatagccgtcacgccgaatctccaaaaaatccgttacgccggttatatcaacaggatgcgcttttggagcagcacatatacctacagcaaatgtttcatcatatgtgcgacaccatgttcgtcattggttaaggtgacagcatcggctatcgatttgatgtcttcccgggcattgcccatcgctacaccttttcccgcagcctccagcatcgatttgtcatttaaactgtcacctacagcagcggtttcctcgagcggaatattcagctgttttgcaagcctcttcagcgcctgccccttggaagctttgcgggaagaaagctcaaagttgtgctcagccgaactgacaagcgtcaaatcttcggcatgctcatatcttttccagcctgcctcaagcttttctttgaagaaagaaaagccgagaatattgtaaaaatcgattggctgatcggcttcaaacagctcttgaaaagagttaatgtaagcaaagcccgattggctgtattgcacctcggccgcctgcttaaggacagaaagatccgcttccgggtttgcgcttctgaatctgtccagctcaacatcaagaagttctctgccgttttgcggtgtataaatcgctgaacctgtgaatacctcataataatagttttccgactcaagccatgagagaatatcatacgcccgtttcttatcaatcgtttcgtgatgataaagcctgccgtcgggatcgtgaatgacggcgccgtttgcactgatgacccatgttttgatccccagcggttcaaagattgacatgacgtcaaaatgagcgcgcccagttgacaccaccacttcaatgccatcccgctgcgcctgccgcagtgcgttttcattttccaagcttacctgatgcttgctgttgagtaaggttccatctaaatcaatcgcaattaatttcacgtttgtcagtcctttccttcatcctgctctgtcacgagaagctcaacgccgtttcggtcaagcaagtcacaaaatgcctgattcggcagcctgtctgtaatcaaaaggtcgatttcattcagctccgcatactgataaaaactggtgctgcccagcttcgaatgatctgcaagcgcgatgacctgctttgcctgctgtatcattttccgcttcaccatgccatcctcttcatgcgcaattgtaatgccatgttcggaaataccgaccacaccaatcagcgctttatcaacatggtagcttgagagcttttcaatcacagaggacccgtacagaaagcggtgctccttttccagcttgcctcccagcagataaatttcaattccctctttatcggacagcacatccgcaagattaatcgaattggtgattaccgtacaatcaaccgcattcaaatgctttgcacatgcttgaacagttgtagaggcgtctaaaatcacccggtcaccatcatgaataagcgatgctgcaagcctgccgatcttatttttttcctcagacactgttttcaggcggccggaatagctttgaattttctgatgcacagtcggcaaaatggcgccgcctcttgtgcggatgatggcattctgttcctcaagtttcacaagatctcgtcgcgctgtatcccttgacacttgcaggagcgtacagatctgttccgttgtaattcggttatgctgttttaaaaaatccaaaatcgctactaatctttcttcttggtacacgccctcattccttttctcagcaatcatttataagtaattataagtttttatttaattctattcaacattaataagtgattttaagtaaaaatacgtcgagagaaccaatttttcctaagtggacaaaaagaaagaaccagtctggtcgactggtcaattttgaggggatgatgcgaagattcggataatggtgaatggatagataacgggaggagcaaggggtgtcaatcagcagctttttcccggggtttagggtccataaaacgaacagtgtcagccaacacttctgttacatacacgttaacgccttccgcgttttcatagcttcttgtctgaatccgtccgcttactccgacgagagaacctttttggcaatacaacgccgtgttttcagctgtttttctccaaagtgtgcaattgacgtaatcagcttcgatttcacctgaagcattcttgaaactgcggttcaccgcgagcgtaacatgtgcaactgccgcaccggcggaagtgtagcgaagatcaggatcttttgtaagacgtccgacaagcatgacctgattgaacatgcgattcctcctctccttgcggttgtatgtattgtaaatgatgcaacaagaaaagaaaaacgcttaaaaatggctttcagcctctgtttttatctttcgttttcatttttccttcagctaaaaacatcttttgctttttccctttgaagaaatatgtactttttaaaaaacggaaaaagatttgctttgtcagccagttttgcgtattcatgcgcacataggaagagccatcccacgcaaaccactgaaagctcaattttttttccggcattgacagcttgattttatactgctccatgccatcttgtgtttcgtataaaaaacttattcttccttttttgttcagatgaacctcaaacacttctttacggcttaacatatatgttacttccttttgaatcaaatggctttcagaaggagcgccgtcaatataaatttcttttaaacgaaattgattcataccacatctctccgtaatccatagtcagttacagtataatgaaaaaatagaaattattaaatgtttcgctcatacaaaattctttagccccagcattgcaggattttttcctcgaaaacgtttatgttataatggaaggcaagaaaactttggaagtaatcggggtgagaagaaatgaaaacctttaaactggttgacctgaatgtggaacgagtggacaaggaagaacaatcaatcgaacagtttccccttattgacggactgattataaataaagaagacggtgaaaatcactggctgattgaggcgcttgtacagaaagaacatctgtctttttttgaacagcttcaaaacagccaatctgaagccaaagtatttgtaacgatcacgaaaaaaagcaatcgccccgcccagctgacagcagcagtgaaaaatatcgtcaagctggaagaaagcatccaggttttactctatggacaaatggtaacaagaaaacagcagggcactgaaaccattctcgagtcccttgtaaaagagggctatacaggaacaaaactcattgaggcatttaaacaaaagttataaatatgagggggcatgttccccaaaacagacacagaaccgaagagcatcacaatagacatttagaatagatatgttctgcatgaaaaaagctgccgttttgaacggcagcttttctcttcgtgctttcactcttgcatatttaatttgtatggccaaaagaatcaaccaattcccctttcacaacaaggcgcccttcagttttgacagccttgtcacatgtgattagcgtaatctcttttttgtttgtctcctcaactacatctgcatccgtttccgatatgatgtctttagatgttacagaatagatataatcctttttaaaatccgtgatgacaatttgggcacctgtttttatattctccagaggtccgaacagaagattcttttgcttcaaatgatggcccgccaacggataatttccctcacccattttttgatccgggcgcattgttgccgcccctatcaaaagattttcattggttgtgccttttacgatcggaagctccagatcgacacttttaattgttatctgccgccttgattgtgaagtaaaaataagtatatttcacgtgctttcgacgttctccacttgactggaatgctttaatggcgatcccggcatctgtagcttcaggctttccttcagaggaatcagaaatctcaaactctattttctcagtgttcagcacataaccggctggcgctttcgtttcaacaaaagcgtattgtcccggtgcaaggcctgaagctgtgactttatgatgccggatatgactggtttcgaagtctgtatgaaaattcgcgaacgattcagcatggtggatcttccggttctgatcattacagctgccattatcggccatgacaaatacaaggcttttcatgccggagcgaatgacattttgcaaaaaccttatcattactctgaatttatggcgcgtattcaaaacctgatcatgatgaaacatacagcaaatcaagccacaagaatggaaatggcgtttctccagtcgcaaatcaagcctcattttctttataatgtattaaacacgattatttctctcactcatttggatattgaaaaggcccgggaggtaacagaggaatttaccaactatttaagaatgagttttgactttcaaaatacatcagccatcagttccttcagacatgagctttcgattatcaattcctatctttctatagaaaagacgcgattcggtaatcggcttgaggttcttttcgatatagatgaagacattgactttatccttccgcctttaatgattcagcccttggtggaaaatgccgttcttcacggtgtcagcaagaaaagaggcggaggatggatcaaactgacagctaaaaaacaaagcaaaaatgagtatcacatcaaagtagaggataacggtgcggggatgcctccggaaaaacaaaaagatctcttatctgcggatttcgatcgcagcgtcgggttgaaaaatatcaatcagcggctgaaacatttttgcggaagcgagttgatgatcatcagcactccggatgcaggcacctctgtctcaatgctcattcatctcgctgaaacaacagaaagccccgcgggactgaaggacatagaacgaacctaaacgaaaattgagataaaaaaaagacgccgtttataacggcatcttttttattccggcgactttgcttgctgcttcagcaggtctctgatttctttcagcagctcctcctgcgcatccaccgcttcctccgcagcctcttcttctgctgcttcttttttgcgccttaacccattcaaagtccgaatgacgataaaaatggagaacgatataattaagaagttcacaatcgtctgtataaagctgccatacttcactacagcatcgccaaacgtaaacgacaggcctgaaaagtcaagccctcccagcagcaaaccgaccaaaggcataatgatatcatttactagagatgtgacgatctttccgaaagcgccgcctatcacaacaccaatcgcaaggtctacgatattcccccgcatggcaaaggctttaaattcattccacatacaatcacctgcttttctatatttgtaaagaaaaaaagacaaatgtgccgctggccatctgccttttttcaattattctccgagggcaaaagtcagttctacttcgcaaacgacttcgccatcaactgtggcaacgccttttccgcgcccgattgtgccgcgggcacgaatgatttcaacctcaaggtgaagctggtcaccaggcttgacttgttttttaaagcggcagttatcaatgcctgcaaaaaaagccagtctgccgcggttttcttctttaatcaacatcgcaacagctccgacttgagcgagtgcttctacgattaatacgccgggcataaccgggtactgaggaaaatgtccgttaaagaactcttcattagcggttacatttttatagccttttgcccgtttgccctcttcaacttccgtaatccgatccacaagcaaaaacggataacggtgaggaataatttctttaatttgctgagtatcaagcattgtcttgacatctccttcatctgcattagtatgtatagcaatcatcaaagatccaatctgtacatttgaaaagtatattatgaattaatctctttttcaaccgcgctaaaatgtaaccaactgtcaatgagagccgtcaaaagttatgatatgataattatagattttaccaatagcaaagaggtaggaaaatgatttcgaagtttattgaaaaaagaatgctaaacatgttagacgagtggtattccgcaatgagcaaacgcaaaatgaatcacgtttgcacactgaaagagaaaattgaccagcaccttccaaagatcaaaaagaacacaaaactttggatgcgttatcaattgtttcaggcccgccatcagctgctttttgaaaaccagaacggactcgattcattgttcgatgacctatatggcctggaagacaaaatggatgatgaattgaaatattatctgtattttttctctgggttatatgagatggtaaaaacagctccgaaacatgcagtacatcattttaaaaaagctgaacagtacctggccgccattcaaaatacgtttgaagccgctgatttatattatcaaaccgccggcgcctattacttgatgaaatcaccgccgctttccatccaatacgtcaaaaaagcattacacatctatttgcaccaattcggctatatcaaaaaggtaatcacctgtaaacttttgctcgccgtgaattatattgatcaagaacgctatgaaaaagctgaacagcttttcaaagaaatcattaagaaaacccagcaactacatgacgaaaacctgctatgccacgcttattataaccttggctttttaaaagcgaccgagaaaaaagaccaggaagcgcttctttactttagaaaagtattaaagaatcaagaatttgaaatgaattcaccagtctcatatcttcattgtgtgtacgagtctgtcagagcgctttttaaaacaggaaacatcacagaagctaaagccgtccttcaaaaaggaaaagaattatctgaaaaggtagacattcaaaccatttatttaaaattaaaaacgcttgaagccctctacacctcagtggaagatccctatgagcagctgctcgaatatgtgcttgaattagaaaaaatcgaggcgtgggtggatttagaagtgctgttagaagatattacggaatactacaaaaaaaaggacgatttcgaaaaagccgctttttttatcatgcgcggctgattgaaaaacgcccattttcttattatctgactgaattgattaaaccgagcatttgatctcccattgtgatcgttctgctgttcagctgatatgaacgctgggacgtgatcaaatctgtcatttgttctgaaatatcgacattggacatctcaagtgagccctgctgcatgccgatgttttgtctattagcgccgtttagctcttcaaaagctgccgcattatcaatagagaaaaggttattcccttcggatttcagctcttgagggttattcacttggacaacgccaagattaaaccgctgaaccgcgtttccgtcagatgcggttaaggtgccgttcttattgatggtgatattcttcattgagctgtcgatgttcactgtattgccgttctcatcaagtacgggatacccatttccagtgacgagctgcagctggttggcattcgcagcggacggcgttacatacagcgccccgtccctcgtatactggcggtttccatttacatttacctgaagatactggtatggagacgtaaatgcgatatccagatcgcgatcggtcttctgaatgcttccttgatcagagaccaggcgtgaattcatcatcgctccgacgccaaggcgtaagccgggcggcgttttgcgggcttttgccacttcctcgtttttttcatcaacctgatcgaattgctgtctgacaagctcagaaaaattcgtatcttttgccttatagccggttgtgttgctgtttgaaaggttgctgctgattgtgtcaatctgctgctgcagctggtttaaggttgttgatgccgttagcattgacctgagcatagttgatgtcccccgttttttcttccgttatcttaaatttttccaatttcatttgctgctttatccatacttttatcgtaagcctgaataaccttctgattcgcctcaaacgatctgtacgcttcagtcatttctgtataggcgcttgtcacatccacgtttgaaagctctgagacgccttgttttaatgaataggatacctgattgtttccggctgcgcttggcagatcattaccgtccgccgtgctgtacaaatcatttccgtcccgtttgagagtgcggacatcttccgccattctgacatcaatctggccggctgtgcgtccgttcgttgtcacagtaccgttttcagacacagtaaaattctcattatcaacagtgattggctggcgatccgtcgataaaatagggcgtccgttgatcgtcagctggttgttctcatttagtgaaaatgtgctgctttttgaataacggattccatccgctgtttgaaccggataaaaaagagcagctttttcattggtttccgcattcatcggaacttgattttcgatcaatgcaatgtctgtaggctgatctgtggacttcaggcttccctgtgtgaagagaggcttgagctcctgcatatacactccggtattcacggaaccgatttccgtcctcgatgtcccggccggagattttgattctattctgctgagcagcatttcagggaacgcgcgcatcgagccttgatcagctttatatcctgatgtatttgcgttagcaatattatttgaaagcatttccgttcttcgctgctgggcaatcattgcggatgttgctgtatataatccttttaacaaatttcccacctctaaaaatggcattttttccagttgtcatataggaacgttcgttctataataaaaactcagtattttatcctattatcgtcatttaacatcttttcgtgaaggctttttcataaaaaaacctcattctttttcagaatgaggtttgtgaaatcagcttagtttgcgtttaggaagcttgtccatattatcaagcatgacacctgtgccgatggctacgcaatccataggattttcagcaacgaggaccggtaccttcagctcttcagcaagcagctggtcaaggccgtttaagagcgcgcctccgccggtaataataacgccgcggtcaataatatcagcagaaagttcaggcggtgttctttcgagcacttgttttgcagcctgaacaataacagcgacagattcacgaagggcttcttcaacttctttactgtttactgtaattgttcttggaagaccggaaaccatgtcccgtccgcgaatggaaatttcctcgtgacgtgcgtctgggaaaacagttgcgactttaatcttaatatcctccgcagtacgttcgccgatcagcagcttgtactcgcgtttgatataatttaagatttccatgtcaaacttgtccccagccattttaatagaagaggaggtgacaatatcgcccattgaaataaccgcgatatccgtcgtcccgcctccgatgtctacaaccatgttaccgcttggctggaatatttccatacccgcgccgatagcggcaactttaggttcttcttcaaggtacacatgtttcccgccgcttttttctgcagcttctttaattgctttttgctcaacggatgtaatattcgtcgggcagcaaatgagcatgcgcggctttgagaacaggccttttacattcagcttgttaataaaatgtttcagcattgcttctgttacttcaaagtcagcaataactccgtctttcagcgggcgaatcgcaacaatattcccaggtgtacgtccaaccattcgtcttgcctcttcgccaaccgccagcactttgccgctgtttttatcaagtgcaacaacggaaggttcattcagaacaattcctttacctttaacatggatcagtacatttgcagtaccgaggtcaataccaatatcccttgcaaacatctatttatatcctccttgaaaatctgtttcacagtaaatatccacattgtgccctaattatatatattatcataaaatatagaaaaaaagttggaagcacaataagttctttacaaatttttgcggatgttttatgaacgatttcaagaaggcaatgccaggtgattacgattgctgaacaggctctccttcgagaatttcatcttttttatatttgagctttgtcgcttctcctcctcttaaatgcctgatggatttatgataatcgagtatttctttcacttcgtttgccaagtcggggttaatttcaggcagacgctctgttaaatccttgtgtactgtacttttggaaacaccaaattccttcgcaatgacacgaacggttttctttgtctccacgatgtacttccctatcttgattgttcgctctttgatgtaatcgtgcacaccactcgacctccctaaaatggatgtgagaagtgtgaaatgagatccgtattctgtaaagagtcgttcattatgccgcttcttcgttgtatggttttaaaagtaagtttgtgaaatatgcccacgatccctcacctcaaacactctctttgttaggtttgtaacagtgtattagcattcttttgggaatatgctaaaaactcaataaggacaaggggtgaaacgaactttttcagattcagcaaactatttcgcgtcactaaattttcatctttacaactattgatcgctcctgtaaaatgaaataagcaattagttacttaggtaagttttttagaaggagaccgacatgtcctacgtcaacagacacctcattcatcaaatcaaccaaagcgcccgcctgattgccaagaaagccaatgaacagctagagccattcggcctttattcatctcaatggtcagttttatattgtttgcgtacgatcggaccaatgactcaaaaagagatttggtcctatttaaatgtggaagcgccgactgtgactcggacgatcaaacgcctggaggagaacggctgggttcagagacggcaaggtgaagacaaacgggaaaaacttgttgtcctcacaaaagaagccgagaaaaaatacgaagaaatcaatgtgaaaatgttgaaattcgaggaagagctgcttgcagatttccgggatgaagataaagaagctttttctcatttattccgcatgtttttacaacaatgaaaataaggaagtgacatacacttgaaaaaagcggatgcgatatggaccaaggattttattatggtcctgcttgtcaatttatttgtgtttgtgttcttttatacatttttaactgtattgccgatctatacactgcaagagcttggcggcacagaatcacaaggcgggcttttaatcagcctgttccttctgtctgcgatcattacacggcctttctccggagccatcgttgagcgtttcgggaagaaaagaatggcgattgtatcaatggcgctcttcgccctatcatcttttctgtatatgccgattcataacttttccctgctgctcggattgcggttcttccaaggaatttggttcagcattttaacgactgttacaggtgcaattgccgctgatattattccagccaaacggcgcggtgaagggcttggatactttgccatgtctatgaacctcgcaatggcgatcggacctttccttggtctgaatttgatgagagtggtaagctttcctgtattctttacagcctttgcgctgtttatggttgcgggcttacttgtttcgttcttgataaaagtgccgcaaagtaaggacagcggtacgactgtattccgttttgcgttctcggatatgtttgaaaagggcgcactcaaaattgcgacggtcggtttgtttatttctttctgttattcaacagtcacatcatatctgtctgtattcgccaaatcagttgacctttcggatatcagcggatatttctttgtttgttttgcggtgacaatgatgattgcacgcccgttcacagggaaattgttcgacaaagtcggaccgggcattgtcatttatccatcaatcctgtttttctctgtcggactctgcatgctgtccttcacacatagcggcttaatgcttctgctttcaggggcggttatcggtcttggctacggatcaatcgttccttgcatgcaaacattggcgattcagaaatctccggctcaccgctccggttttgcgacggcaacgttctttaccttctttgacagcggaattgctgtaggatcgtatgtattcggattgtttgtagcatctgccggcttctctgccatttatttaacagcggggctgttcgttttaattgctctgcttctctacacgtggagccagaaaaaacctgcagaggctgaaggaaaagtgtctattgcagaataacttgtcagactgccgggaaatcccggcagtcttttttccattaaaacacggcgccctctcggttgaacgagagaacgccgcttatagcaattattcaatgacaggccgcgcaggtgaatcaggatctaacgaaaaatcataggacgcttcatcacgaaacatcggatcggcatatatggattgttgatcgttttttgttgcttttcgatacgaagaaaatgaatcatattctttctttttccacatccatatgccgtcttgatccgcttccttgtggtacacgttatgattgaccgtattaccttcgttttctgtaaagtcgtttccgataaataatctggaatcaccggccgtcaatatattcttttcaattgtgttgtttttcgtatcgtactgcagcagcagctgtccgccgtacagtccctttgtgtcattccggtacataatattgcgggcaatcagagaattgctggtgccgccccgctttttgtcatatcctccgattgaaataccggtgtacgcattgttgtacactttgttgtctgtgatctgaatggcatttgcatactttcctttgtgttcagacgttgcttcaatcccaatatcgttatcgtaaactgtgttgttcttaatttcgatatcgtgtcctccatcgacataaatcccgcccgctgagtattcatctccataagcaggattgccgtaagtcgagttttgataaactgtattgttttctacgactccgtttcgcacgtaatcgtttttatccgcggttccctcataaccaattagatcaatcccgatgttattattgttgcggaccacattgcctgcaactgtgaagccgtcgatattaccgttcagcacaactgcttcactcgctccaagcgtcagtttctcaactgtattgtcctcgattcggatgtctttcatgctgccagtcccataaactgcgattccgtgagcatttccttcatccgctgttgtcttaatcccccggatgtgattatccttaatggcgatatgactgctggaccctgatacataaatccctatagcagttgcttcctcagatgaaacagaaagatcttgaattgttaaaccgctgatggcaatgtcatgtttatcgtgaatacgaataagcggtgtttcatattcagcgttcgcaacggattcaccgctaatcacgacgttttcattttcatagtttcggaatgtgataggctttccgtccgtaccgctgtgctttacatcaagggtctcatgatacgtgccctcccgaatcatgacagttgtgccggcagcagccttctcagatgcgtgtgccaatgtacgaaacggcttttcttttgttccttcattttgatcactgccatttggcgaaacatacagataatccccagatccttcctcattcgcttttgtcttatcataaacgaaagcgaggatgacagacgttaaaacacccgccaaaagaataaaataccattttctcattttcgattcccatttcgttttagaatagatttctaaaaccattataaatgttctatttatggaaaaccatttcaaaaatatgaaaatataccgtctaaatagatcttattcagcctggcggacctgcgcatgttcaactgtttcaattgccaatgatgcaggcgggtgaacacgcatcagaacaatgtagaaaagaaaggaaatcagcacacctacaaaccaagaaatatcgtataagctcttcaatacaggaacatacatgccaatcagcgaaatcagcgctcctaacattgtggctgcaaacgcacggtaattgtagcccttccaatacacataccgtcctgtttcggaatacaggtcatctaccgagagctcacgtttgcgaatgataaaatagtcggccatcatcacgcctgccaccggtccaagcatgccgcctattaagccaagaaacgcatacacgcttgtcgcgctctccatcagcttccacggaaccgtaaataaagcgagcaacgctgtgataaagctgccacgtttgaaattgatatatttcggcagggcattcgctatatcataagcgggtgatacgatattcgccgcgacatttacagagatcgtggcgatgcagagtgtgatcacggacaagacgatgacataagggttatcaaaccgcgccaaaatatcgacaacatcccaaatcggctctccgaacgcgacctgcgagccggaggtcaccgtaatacttgcgaatgcgaacagcgcaaacgttcccggcaaaccgtaaaattgtcctttgatttgctctttttgtgtttcagcaaaccgtgtaaaatcaggtatatttaagatcaatgtcgcccagatgccgatgatgccagtaactccggcagcaaacggccagaatgtttctgaaaacgtatgaaactttcctggttgagagtatatcgggcccaatcctccagcaatatcaacggcccaccataccatgccgccaaataccagatacactaaaggccctgcccacacctcaaaacgtttaatcgactccatgccgtgatgcaatacgagtaaatgaatggcccaaaagaatacaaaggaaagcaaaccggacaagtgaatgccgagaatgttccactcgccgccaatttctccccaacctggccacatattcaaaagcaaaatgttcagtgccgtgctacccgcaaaggtctggatgccaagccacatgatagctgtaaacgcccttagaagcgcggggatattcgcgccgtatatcccgtaagaagcccgaatgatcactggaaacggcagcccgtattttgtccccgcatggccgtttaaggcaagagcgccaaataggataagtgatgccgtaataatgatcgccagcacctgccaaggcgaaaggccgatcgcaattaatcctcccacggtcgcgtaggtcggtatgttatgtatacatcccatccaaatggaggcaaagttcattgctttccacgtccgtttttcctgtcccaaaggcaccagatcttcattgctcagcctgttggattgctgctgactctcttttaatttcatagccggctcccctttccatattgtctatatgtcgtcacacgttatgttttttgacattagatgtcacttaatataactgaagagtcagacaataacactggctatgatatacaattttcccgtttgtatttgaacaacttaaacaagaaaaagagacagacctcagagcccgtctctttcttaagatgcagttttcattaatgcagcaaatctcacagccattaacaggcttgctccgcccgctataatcataatgattcccatcatatcaaaatgggctgccgtgatttctttaccaaaaagaatgccaaggatcaccgaagacaaaatcgatcctaggtaacggcaggtttgaaacaggcctgaagtcgttcctaccatgttggaaggactcgtttccagcatcgctgcctgaagcgcgacattgcccagtccgtagcctatacccaagagcgacagaatgaggcctttaccgatggtctggacattgataaaaaagatggttaagagcacggctccagccgtcatcaaaagcgctcccgcaaagatcggcttgacgacaccagatcggtcgatccatttgccggttagaggtgacacaacgatgctcattccagacataaacagcataaacaggccgctcgtttgaacagaaagatgcatttcatcctgaaagtaacttggcaaaccaaaaaataaacaatagaagaaaacattcaataaaataaactgaacatacacggctgacaggtttcgctgtgttttaaacagacggacatcaataaacggcttatccgttttcagctcgcgccagacaaacgcacagagcagaagcaagccaagcacaccttcaaccgcatgcggcgacgtgctgaacgacagcaaaaaggatagaaggaaaatgattcccccggcaaataaaacaattccaagaatatcgagctgccgaataatggttttgattcctgccccttttttctgatctttcgggaacatatacaggcccaataagaagctgaggataataaacggcaaattaacgataaagatcgccggccagcctccccatacaatcaaaaacccgccgactgtcggccccagcgccgtcatggcggacgcaaaaatagagagtacagccaaggctgaagcttggcgctcatgaatatgattccgaatcaagccgacacctgacggataaatcgcactgctccccaccgattgaaacagccgcatgaccaataatgtcataaacgtcggcgcaaacggcgccccgatggcagaaaccgcaacaagaataagcccgaataaaaacaagcgtttccgcccaatcaaatcaccgagctttcccgttacgggctgcgctacggcactcgccaagtaaaacgaggaaatcagccaggaaaccgttgtaaacgagaggtgaaactcatgctggatgctatggagcgcaagagagatcatagacgagttcagcggattcagcattgttcccgaagccacagctgttaaaaaaacagctcggctttttttcgataacatcatttcacttgttccagaaactcttccgttgtccgcgatttaccgattctcgggaaaataaagcgcagtgtggcttcatgctcttcatcgctaaatgtggacatggcatctgtaataaaaatctgctgatagccaagctgaaatgcctcccgtgctgtgctttccaccccgatattcgttgcgatgccgcacaatacaatcgtatcaatgccgcgacgtctcagctgcaagtctaaatctgtgccaaaaaaagcaccccattgccgttttgtcacagtataatcgccatcctgcacaccgatttccggaacaaattcggcccagtccgccggcatttcccctgaacctccctgcgcaggctcatccgtttgcggcttcagggcgtccgctccatcatgaaaggctacatttacaaagctgatgaacccgttatgtttccgaaattcatctacgagctttttcacgttcgggacaacctggccgctttgatcaatcggcacaatccccttttgtaaatcaatgataaccaatgctgttttttgaaaatcaatgttgagtgtattcatcatacgtctcctcctgatactgttagtgtttctcacattgcatattttactcttcacactgcctaagttcttttatgatgcttgtgaaattctcagaaggagcgttttctcatgatttttcttttatgtaatagtaacaggttgtgcatacgaacaaaccggcaagcacagtaatcataaggggcgtcatcacttcatcacctgcctgctgtctatcggttcctgcctgaaaatgcccatgaatttgcggcggtccatccaaagcaggataagacacataaccattaatatcgtgctaagatcctgcacgccaatgtcaaaacaatagttaatcaagacgatgttcacaataatgggcataaaaataaccgcccctaatgcagccgttcgcggaatcagtaataaaacagctgccaggatttcaccaaaacctataaacagttcatagacatgagaataaccgaaaaatgtccacgcgatcgtaaaccccttcccggcagccgcctcgatttcaggcgtcacctcgccaaactggccaattaccactttcgccagaccgtacacgaaaaaattaaaggctaaaaacaatcggaacgtcgcgggaatcgacttgcgtaccgctttcctcagcctgccgcctttcttcatcatacatccccctcagtgtattatttgatatagtacacttaatacagtatatagtattctaattaatgtcaattcccttttcagctcatatgaatagctgcttttatagatacaaagtcttatatcgtaaaaaatgtcgttctcctttctttccgtccctcgataacatttcttaaaaaccatgttaggaaatcttacacgaaaatgttttatcattcttttttctctataatgaagaaatataataattgctttttattctgaaagatacggaggaatgagacatgcaaatgggcgatacagtttttatgttcttttgcgctttactcgtgtggctgatgaccccgggattagcgttattttatggaggaatggtaaagagcaaaaatgtgctgagcactgccatgcacagtttctcttccattgccatcgtttccatcgtttgggtgctgttcggatatacacttgccttcgcaccaggcaattcaatcatcggcgggctggagtgggccggcctcaaaggggtcggatttgatccgggagaatacagcgataccatcccccactcgttatttatgatgttccaaatgacgttcgccgttctgactacagcgattatttccggggctttcgcagagcggatgcgattcggcgcttttcttttattctcggttttatgggcctctttggtttacacacccgtagcgcactgggtatggggcggcggctggatcggccagcttggagcgctcgattttgctggcggcaatgttgttcatatttcctccggtgtggcaggacttgttcttgccattgtgctcggcaaacggaaagacggtacagcgtcttctccgcataacctcatttacaccttcttaggaggagctttgatttggttcggctggttcggctttaacgtcggcagcgctttgactttagatggtgtagccatgtacgcgttcatcaacacaaacaccgcggctgcagccgggatcgccggctggatcttagtagaatggattattaacaaaaaaccgacaatgctcggagcggtatctggcgcaatcgccgggcttgtcgccattacgccggctgccggatttgtcacaccgttcgcttctattattatcggcatcatcggcggggcagtttgtttctggggagtattctcgcttaaaaagaaattcggatacgacgacgcgcttgacgcctttggcctgcacgggatcggcggcacatggggcggaatcgcaacaggattattcgcaacaacctctgttaactcagcgggcgcagatgggttattttacggtgatgcaagcttaatctggaaacaaatcgtcgccatcgccgccacttatgtttttgtatttattgtcactttcgttattattaaaattgtaagcctcttccttccccttcgcgcaactgaagaagaagagtcacttgggcttgacttaacgatgcacggggaaaaagcatatcaagattctatgtgaggagtgacgctatgagcggtcaaatgttcaaggtagaaattgtaacgcgtccggcaaattttgaaaagctgaagcaggaactcggaaaaatcggagtgacctctctgactttctccaatgtacacggctgcggccttcaaaaagcacatacggagctctatcgaggggtaaaaatagaaagcaatgtatacgagcgtttaaaaatagaaattgtggtcagcaaggttcctgttgatcaagtgacagagaccgctaaaagggtgctgaaaacgggatcacctggtgacggtaaaatatttgtctatgaaatcagcaatacgatcaacatccgcacaggcgaagaaggacctgaagcactttaatatcggtacgagattcggacactccggatctctttttttgtgcacagaatcccccccagaaaccgcgattcctcttcgaattctcttcaagcgccgttatttcagacaatctctatttttatttgaaacttttcatgagtaagattagtctactaaatataaaaatgtaaaaggtgattatttgaactacgaaatttttaaagcaatccatggactatctcatcacaattcagttctcgattccattatggtcttcatcacggaatatgccattgtcgcctatgcccttatcctattggcaatctggctgttcgggaacacacaaagcagaaaacatgtgctatacgcaggcatcacaggaattgcaggccttgtgatcaactatttgattacgcttgtttatgtcgaaccgcgcccgttcgttgcgcatacagtgcatacactgattccgcatgctgcggatgcttcatttccaagtgaccacacgacaggtgcattagcgatttctattgcgatgcttttcagaaaccgcaaaatcggctggccgcttgtcatttttgggcttttgacaggcttttcgagaatttgggtgggacatcactatccggtagatgtattgggcagcctcgttgtcgccatcattatcgggttccttttctttagattttcagatctgcttcgcccgttcgtcgatttggtcgtgaggatctacgaagccattatcaataaactgacgaaaaaaccaaccgatcaaaatttctaagaaagacaaaagccggcgtctgaaatcaagacagccggctttaatatttctcatacatctcttgttttcttcgcttcgccaacacatataaaccataaaacaacccaattccaacagcatcgatgagcacatcccggatacaaccattcctgctgaagaagagctgaagaacttctgtgaaaaaagcaaacgcaaatgagccggctgcagctgatcttatgctgccccgctgtttccacagcaaatatgtcagcacaaagaaggaaaacgcgtgtccgattttttgaataaacgcttcaggtacagtaagctcagtaaaatccataactaaaaattgagacagatcagggtgcggctgaaaatgaaaagccaccgtttgcgatacgaccatgccgctgaagctttccgtacagacagaaagcaggataaaaaagatccagcctgcgagcaataggcggttcatgacataacctcctttataacgtacgtgcctacatgtaactacatagacggtaaaacaaagcaaaaagtaacagaaaaaaacgcccatcacaaggatagacgttttcttcattaagactgttcagtgtcttctgttgtgctgctttctttagaaccagatttgtcagttgaatcatcctttttctcaccggatttttcttctgttcctttttcagttgatccgtcctttttctcggaagattgctgaatggattcttctgtttcttgggtggcagctttttcttcagcagctgctgctttttcaatagaagaaactggtttgtccataaagtttaacggattcattgcaaccccatctttacggatttcaaagtgcacgtggtttccgctgtcttcactgtaaaggttcttgccagattttccgatcacttgattttgttttactttgtcaccttgctcaacgcttacttcggaaagagattgatacacagtcgataaaccgtcggcatgttctacttccacaacatatcccagcactggatctttttcagctttaacaaccgtaccgctcagagaagcagagacatcgaaatcttttccgtctttctcagctaagtcaattcctttgcttaggctgtacgtgttattataggtaacgagtgctgcttctttctcttcttttgcggcatcggtttcatagaactttttcacaacagaaacgttttcagaatcaacaaccggcattgcgacattttccattgactttcctacttcaactgcatcgtcgttgttgtcatatgcggagtttccgccgttatcagccaactgatcctttacctcatcatttgatactgattgataccaaaggacagctgttaaaatgacggccgcactgactaagtaaattgcagggaacacccagcgtttacgaaaaaactgctgaagttttttgacttgagaagttttcttttcttcctctctcattgtttcatcacctcagcaacattctgaacacttttctgaaaatatatacaacctatccaaaaaaacttttttagatgtagtttgcacagactgaacgaaaatatgtatttttttgagaggagtgccaaaaacgtatgaacatgacattgcgtcttgctgaacatagagacttggaggctgttgtggcgatttataattcaacgattgcttctcgaatggtaacagccgataccgaaccggtaactcctgaagaccggatggaatggttttcgggacatacagagtcacgtccgctctatgtggccgaggatgaaaacggaaacgtcgctgcctggatcagctttgaaacattttatggaaggccagcctataataaaacagcggaagtcagcatatacattgacgaagcatgccgcggcaaaggtgttggatcatatttgcttcaagaagcgctccgcattgccccgaatcttggcatccgctcacttatggccttcattttcgggcataataaaccaagcctgaagctgtttgaaaagcacgggtttgcagaatggggactattccccggcatcgccgaaatggacgggaaaagatacgatttaaaaattttagggagagagctttcatgattagtctggataaagatgaaaacgaaattgaacatcataatgaagaaaatagccttgttgaacaggagactgcacctgttggacaggagagccgccagctgagcgcctccgctgtcaagtcgctatccgacattgccaagtggggcaaaatttctggcatcttgttaatcattatgggatcgcttgtcactctgtctgttttgatgacagtgattggcgccatcccgggcgtgctgctcattatatcaggcgtatttttgatgcgctcagcaaaagcagccgcggaagccgaaggaaatctagccggcagcgctggcgaaagcatgcttgaaaattacgggacatttataaaaatgcagctgttttatgcagcatccagtatcgttactgtcctgatcgggatcattgtagccattttcgtgctggtggtaatcggcattgctgcttttgagaacacgccttcgtatgatgatccggattcttattattatgaggatgatccggtgtttgaataatgatgagacaggacagggcatgagttccatataaacggaaccatgcctattttatttgactattcaaagcaggccggcgtaaacaccaaatcctgaagcaagtacaatagacatctctagtagaagaaatcaacaaagcaacgctgttacccagaaataaataacaaaaaaactacctatgaggtcggaatctatctgaaaccgcgctttttatttcgggtgtctgcatgcaaaaaaacacacccggatcgtctggaaaatctcaacaatccgggtgcagatcttctttaatacatttttttgcgtctgtcttcctcagtcaaaaattcaacaaaactccgcatcgcaaaaggctcttcctttatttgccgtgcgtaggagcttttccgctcttctgaaaggatttcgctctttttgatcctgttcagcatatagatgtgaactgttttttggatttgtttatgctgatagcctgcctctttaaaaaatgcgagcccgagcgccgccaaaagagcgaatatgcctgcgctgatcagggactccctgtcagctgaagcatgaaatagaaaagcagctaaattaaagagagagaatgcagcaagcggaatagcaagaaaacggtaaatgacggtttttttcatgaaaggctgtacggccttttgaattttttgcatttctgttttgatgaaccccggcatttgttcgactctgtaaaagttcatataatcctccccctttatttgatgtttcaagcttcacgaacgttacatatgtgtttattttaacgcaggtgcaagctggttttaaagaaatctgcccgtatttttcacgaagaatctggatcgccgctctttattcttttaaaatgtgagtgttataatttgtaatgggaatcagatcactgttattcatggaatactaatggcaatcttcttgataaatatgaatgagcggggttacaaagtgagtatttcttccatccttttatcactttttttcattttaaatattcttttggccatcattgtcatcttcaaagaacggcgcgatgccagtgcatcttgggcgtggctgcttgttcttttctttattcccgttttaggctttattttatacttattattcggccataatctcagacgcaagcatttgtttcaatgggaagaccggaaaaagattggaattgaaaggctgctgaagcatcagcttgaagatttagaaaccaagcaatttcagtttaacaaccgggcaacctttgataacaaagatttaatttatatgctgattatgaataaccatgctgtgtttacagaggataattcagttgacgtcattacagatggacgggataaatttcagcggctgctgagtgacatttcaaaggctaaggatcatatccatttacagtattatatttataaaggcgatgaattaggcaaaaaattgcgggacgctctcatccaaaaggcgaaagaaggtgttcaggtcagagtgctttatgatgaactcgggtccagaacgctgagaaaaaagttttttaaagagcttcgcgaggctggcgggcatgtggaggtctttttcccgtcaaagctcaggccgattaacctgcggctgaattaccggaaccatcgaaagcttgtgatcatagacggtatgaccggttatgtcggaggctttaacgtcggagatgagtatctagggcttaatccgaaattcggttattggcgggatacgcatatccggctgcaaggaacggccgtacacgccatccaaacacggttcatccttgactggaaccaagcttctcatcaccatacgctgacatatattccaaatcactttcctgattacggcccaaaaggcaacgtcgggatgcagattgtcacaagcggccctgattcggaatgggaacaaattaaaaatggctacatcaaaatgatttcgaacgccaagcgttccattttgatacaaacaccttattttatcccagatgcaagcctgctggatgctttaaggatcgcttgcctttcgggcattgacgttaacattatgattccgaacaagcccgatcatgcctttgtatactgggcaacactttcgtatatcggcgatctgctgaaagccggagccactgtctatatttacgataacggctttattcacgcgaaaaccatcgtggtggatgacgaaatcgcttcagtcggcacagcgaacattgatgtccgaagcttcaggctgaattttgaggttaatgcatttatatacgatatcaccattgctaaaaaactggtttcaacttttaaagaagatttgctagtatccagaaaattcacctatgaggagtatctgcagcgcccgttgtggattcgaataaaagaatccgtctcgcggctgttgtcgccgatcttataagatgtgcaaacccccggcctttacggccgggggttttcctgatggtcacagtaaatgatgatcgcctcccgcaaaaaagcggcaagaccttctccatattgattgattgaatcggtaaatcgctcgtcagtgatatacacttccccgagtcctctgaaaatgtcgagtgtgcaatcgtaatgatattggcaaatatgatcgcgaaatgcccccactgcggcctgaacctctgcatcatcgggcccatgcttcattcgcgccgcaattcgtctgtaaatcgaatcaaattcagccatgatcgagcgccaatcatctgccgagtatgcagatgtccttttctctgtttcttctgcgatttccttaccatacagctttctgacttcgtcagcgtatgtctgctgatgctcttcaatgtctttcatgcttaatccggcaaataaatccctcttattcatcgtttcccctccatcaacggacaaaagcgtcctgtcaattgtttgaatcatctcatccattctttgttttttcttcatcaatatctccttttgcgactgaagtgccgctttccggtcaaaattcggatgatccagcatctccttaatctcatccagacgaaacccgatttccttgaaaaataaaatctgctgcagtctttccaggtctgcgtcactgtacaaacgatacccagcatcagtaagcgctgaaggattcagaagctcaatattgtcatagtgatggagcgtccgaatgctaacacctgatatctccgccacttgtttaacttgatatttcatacataacacctcctcttttttatcgtaaacaatcacgcaacgttagggtcaatccccaaaatgttattttctatatacaaaacttctcacaaatagtgtataaaagaaaagtgagtatttttttgtaaaggggagccagtatacatgaatcctgaaacaatgaacaaaaccctcatcagcatttcgaaatggggaaaagctacaggcattttatttattattatgggcgcaattaccgcgctttcaggcgcgttcttttttctaatcggtgccgtgccaggcgtactgcaaattatttccggtatctttttgatgaggtcagctagggaagcaggccaaatggctgaacacaatagcggacagtctgaagacttaatgctggagaattacgcgaaattcgtaaagatgcaagggatttatttgatcgtaagcattgctgtatccattcttgcgattatcgccttcttcatctttttaatgcttgggattgctgacggccttttcagcgatacgtacagcacttattaatgagaaaaacccggagctggctccgggttttttattattccgcttcgcttaccactgtgaagcgttcatttttgtgttcgggatgttcaagctcgtccaacacggcaatggcataatctgcatagctgatatagctgtcgccttttgcatttacgatgacattgtcttttcctttttggtaagagccagtccgttttcctgctggatcaaaaaatgctgcaggactgaggaacgtccaggaaatgaagtctgtctgctgcaaatctttcaggttctctccttgatttgatgcagttggcaaatattctttcggaaattccggcgtatccattaaacgggttgttttggcttcatcaacaaacaggcttcccgctccgccaacaacaagcaatcttgtgcgcttcgcgtcctttaagatgttgatgagtgctcttcctgcttcaacatgaagatgttcttggccgggtgctgctccaaaagcgtttacgactgcgtcgaaaggcttgatgtcttccgcagtcagttcaaacacatctttttccaaaaccgctacgtcctgcccctgcacttttgaagcgtttctgacgatggctgtcacttcatggcctcttgttttcgcttctttcaaaatttcgtttcccgctttcccgcttgcgcctataataccaattttcatttttcatttcctccttatttgtaacaattttagttacatgttagcggtgagaagtcatcccttttgattaaaagagatgattcataacatcttttaatgacttgcttgccagttcattttccatcgctctttgcacactttcaaacgtttcatccagagcgttctgaatttttttccctaccggacatttcggattcgggttttcatgaaccgcaaagagttcttcttgcttttggacagcccggtacacttctaaaagagaaatatcagcaggatcttttttgaggcttgcacccggcacccctgcgcgtgatgtgagaatatcagcttttttcagcaggctgatcattcttcgcacaactaccggatttgtgttgacactgtcagcaatgatttctgaagatgttttttcatccatcgagatgagggataaaatatgaatggcaacagcaagacggctgttaatcatgttttttcaccaccgttgtaactataatagttacatttgattcgtttgtcaacatctaatatacactaaatacacgggttttgtgcaccgtttttagtcaatagaacggccggatgcactccggccgcgtcttatcaaaataagaaatatctttgtccaagtgggacataatcgacaggctggcaagacaattcctccccgtcagcaaagacctgataggtttttggatcaatctcaatctttggcaaagccgaattcagcttcatatccagcttgctcagctttctgatatttttgactggagaaatccttttttccagccctaagctttctgccacaccacgctctatgcttgcctgagacataaatgtaatcgaggttgagcggttggcttttccgtaagacgcatacatttggcgcatgaaaaccggttcaggagtcgggatggacgcgttcggatctcccatttgcgcacgtgcaatcatgccgccctttaagaccagttccggtttcacgccgaaaaataccgggtcccacagaacgagatcagcaagcttccctttttccaccgagccgacctcatggctgagcccgtgcgtaattgccggattaatcgtgtatttggcaatgtaccgttttgcgcgcacattgtcattcccgttttcaccggcaagagcgccgcgctgttttttcattttatcggctacctgccatgttcggatgatcacttcaccgacccgccccatcgcttgggaatccgatgatgtcatgctgatcgcacctatatcatggagaatatcctccgcggcaatcgtcgccgccctgattctggaatggctgaatgccacatcttcaggcactttcgcatctaaatggtggcagaccatcatcatgtcaagatgctcatccatcgtattaacggtataaggaatggttggcgttgtagatgacggcagaatgttcgcgtaagaggcgagcttcataatatccggagcgtggccgccgcctgccccttcaatgtgataagtatgaataacccggtccccgatcgcgtcgagcgtgttttccaaaaagcccgcttcgttaatcgtatcggtatggatggcaacttgaatatcagcctcgtccacgacttccatacacgttttaatggcgcttggcgtcgtgccccagtcttcatggagcttaaggccgatggcgcctgcttccacctgctcgatcagcggcgctttatcggatgcattcccttttcctaagaagccgacattgatcggaaactcctcggccgcttccagcatcctcgccatataccacgccccggacgtacatgttgtcgctttgcttcctgtagcgggtcctgttccgcctcccaaaagggtcgtcacacctgaagaaagcgcaacttccatctgctgaggacaaataaaatgaatgtgcgtgtccactcccccggctgttaaaattttgccttcaccggaaatcacctctgtccccgctccgatgaccatgtgtggatcgactccatccatgatatcaggatttccgctttttccgacaccgacaatccggccgtctttcacaccgacatccgctttgacaatgcctgtgtaatccaatagcacgacgttggtgataactaaatccaaagcgccgtccttccctgtgattctgccgttttggcccatgccgtcgcggattgtttttccgccgccaaagatcatttcttcaccatatactgtgaaatccttttcgacttcgatccataaatccgtgtcgcccaatctgattttatcgcccgttgtcgggccaaacagttccgcatattcctcccgtgacattttcatcggattacaccctccatccagccggcttgttttaagttggccaacgttttttctttgccgcgttcatcgataaacgtgtcggccattccgttcagccctttaattgtcttgcgtcctctgatttccactagtgagaccgttttctgctctcccggctcaaaacggaccgacgtgcctgatggaacatcaagacgcatgccgatcgccagctcacggtcaaataataaagccccgttggcctccgcaaaatgaaaatgcgaaccgacttgaatggagcgtgatccggtgttttttaccgttacctcccgtatctcacgcccttcattaatcgtaatggttccctcagcaatttgaaatgctcccggcttcatgacttcacctccgcagaaattggctgatgtaccgtaacaagctttactccatccggaaatgtggcctccacctgaatgctgtccagcatctcaggcacaccctccatcacatctttttccgttaatacatggcggccggcttccatcagctctgctactcccttcccatcacgtgcgccttccataataaagcaggtgatataagcagcagcctcaggatagttcagcagaacgccccgcgcctttcgctgtttggctaattcccccgctgcaaaaatgagcaatttctcttgttcaactggtgtcagtttcatctgtagtcctccttcttttgtcatataaagcagatgcggctactacgaatttgcggaacagtcaggcgggacatcacctccctttcttcgggaatgggggtcatacggtaagatgcctttcaaagcggcatgccgtttcttcatcagccttgccatggtcaacaaccgttcccctgtcgatcacggaaagatcagattaacgcgttttccagactgcgctcgactaagataacaaatgtctttttttctggaaatttctataataacttgtctgactagttcgacaattaaaatctgaattccttccaattgtttattaagtaaaatatttttcagatttaccatcagcgctctggcgattgcaagctgctgctgttggccgccttttcgctttgaacaaacgtttgattaaaataaatagcccccctgtttagccggaagcaggcctatggagtggatggccgactccatttcggcctaatacagcgacaatctgccccgggcgaagctaaggctgtgcaaaaccatcgattgatcataaccagacgttacattcctgatggcagcccgttgttttgctccgcaaccggaagtatggcatggaggccagtctgaggcgccgacctccacgataccgagaacccaactattgccattaactccgcatcatggacggtcacttcgctgatcgccaccgttcctcttaatgagtgaagaattccggccttcactgaatccccgcttgtgtcgatatcaactgttttctcgcactcccgtggcttccgacactttcttcggtgcagtacattcagccatcaaaacccctttgtttgatttcttcaaatgatgttataaaagtttacaacttatgtcatcattatatagaagaggcctattaattcaaagaatatttaaaaaatttagttaccttgaccaaatcagcttctttttttgttatatttattcacatcagaaaaagcgaaaaaaaaagacaagaaacatttcgtttcctgcctcttccgtacgattaatctttatctgaaaatttatccttggctttcccgatatccttttggatttcgccttttgccttatcttttttgccttcagcctgcatgtccgttctgtcagccatatctccgactttatccttcacttctcctttggctttattgaagccgcccttcattttgtcttttacactatcgttacccatgttaattctcccctctcaattatgtgtgtacttgttaacttcccgatctgagaggcaataaacattctaatgttatttatcgatttcgtagcgctctccgtaacggagcaccttgtatatcgccagcccgtctgatgactttttctccgaatatcggaccggcagcagggcaaaaaacacataatacgtagaaaaatagacaaactgatagaaaaacacattcggctttaatacactgtgtataatcagcagattgattgcaaaaatcgtgatgaggttaaacaagcagcctcctgcatacacgagtgcatttgagaatcgattgtcaattttcaactccccgtaccggcaaaaagaatcgataaaataaatcgttctgaaccgtatgggtccaattttaagcagcgtttttcccatgcctatatccaacgatccctttccgccaaaaataaaagccataaagctgtgccctgaaacatgtataatctgtacaagcggcagaacaatgaggaaagaccacagaaacttcaccatatcattaaaaccaaacattgaattccccctcacatgcatatctgcatcccaaaacggcttttgttcaaaaaacagtgctgtagcgatttttcctgttctccccggaaataaacgttccgatgctcccctttttttgcataaaaaaaaaccatctgccagcagatggttttgtctcatacttcatataaacaatcgttcctttgaatcatctctctcatgctgaccgctttttcataaaaatacaccgcttctttatattgttcgcgatgactgaaataagaggcagcatctaaagcaaattcttcaatatatacatacaggcccttttcttccatataatcaaatacttcttgaatcatatccaaattgacagattccacatataatgcctgcagaaatttatattttgccagactgaagaagtcgtttcgtttttgggcaatggcaatccctttttcatagtaccgtatcgcggcttcgctatcttgttttttgaaaagaacgcgagtcaggctgaagagcgcttttggaagctgttccagctgataatcctcgaagacaggaagcgctttttcaaagtattcggcggcctgatccagctcccccttgtcatcatagcaattcccgatattataaagggctgatccgatcaaacggggctgtccttccaataaagcaaggcgatacgcgtcatccaaatgctcaagcgctttttcataatttctgtagtctatgtagtttcctgatatgacgaaatggcattgaattcttctgactctataaaaatcgtgagccttatacgtctccagcgcctgtacagcgtggttcatagaaaagtgcgtctgcttcataatataaaagacttccgccactttaaaatgaaattccgctctttcaatttcatcttctacaaacgcaagcatcttctcagctttccgataaaaggatatagccgagatgtaattgttctgttcaaattcgtacattcctctaaacaagtgaaaataatactcagataatccggagatgctgtcctgattgctttccagcgttttgatcaattcacgatattgaagctgagattcctcgtgcaggtcaggctttacgtaatccagcataatttggtgccggtagctgatcagctgataatacaggagaagcagctgatcctcttccatctgttcgatatctagatcaatttcttctttcagctttacggcatcagccacttgaaatgctaaaatgtgcttataccacttattgattttcactcctacttgagatgacgggatctcgtacgcggccatgcccctccaaccctttctattttctaattggttatattttatcataatgtatggctttggaattaaattttcttacaatgattccttctttatgcctatccttatatatttcggtttttctacgtattttttgcactcggattctaataaaaaagcttaccggacagtgccgataagcttttgacttcaaattaaccgccaatataagacatttccactttctttttgccagatgcttttgatagcgtacgatcgactgaatactgatcgatccgatttttccatactgtcccgatcatttctgatagttcgtcatcacttaattcctggcgaaccggagctctgaggtcaaatccgcttgaagcgaataagcaggtaaacagctctcctctcgcagaaagacgggctctgttgcaagatccgcagaacgcatcagatacagatgatatgacgccgatttctccggagccgtccaagtagcggaatctggaagccacttcgcctatataattaggcgctatcggctcaaccggcatgtgttcattgatcaaatctatgatttccgcctttgtcatgacgtcttttttttcccattggttggtgttgcctacgtccataaattcaatgaatctcaggatatgccctttttctttaaaataacgggccataggcagtatatctttttcattgacgcccttttgaacgaccatattgattttaacaccgagccccgcttgcttcgccgcttcaatgccttccagcaccttgctgacagaaacaccgcgcccgtttatcttcttaaaacgctcgtcttctaaagaatcaaggctgatcgtaacccttttcagcccagcctccttgagcctcttagcataaacaggcagcagtgatccgtttgtcgtcatcgcgatgtcacgaatacccggtatgcgggccagttttttgattaattccggcatatcctttctcatgaggggctctccgccggtcaagcggattttttcaacgccaaatcttgtgacaaacaatgtcgcaagccgttccagctcctcaaatgaaagcagctcctctttctttaaaaaaggataatccgggccgaataattcggcgggcatacagtacgtgcatcggaagttgcagcggtctgtaacagaaatgcgaaggtctctcagcggtctgtttcttttatccaacatctgacgcgactctgtaatcatagctacagccccttcctactccctgattctctcagggtgtgtatatacattaaatgatccgtttctgacaaatccaatcgctgtgatattcaattcttcagccatttgaatcgcaagctccgtcggggccgatttggaaatgacaatcgacacgccgattttggccgcttttaacaggacctctgatgagattctgccgctgaacacaatcagtttgtcgcgtacggacatcccgtttagaaggcagtgcccgtatagtttatcaagtgcgttgtgccgaccgatatcggtgcgcatcaacagaagcttctctgtgtcgcaaagcgccgcattatggacgcctcccgtatcctgaaacgtcccgctcccttgctgcatgtctttcataagcgccagacatgcctcaggcgatatcttgatttggctgacagccgtcttggctgttttgacatcctgctgaaaataaaaatgacggccctttccgcagcatgagccgatcacccgtttcgtataatccttttgatccaatgtctcagggtgaacgaggtcgacatatacaaaaccgagactttcatctattgtaaaccttttaatttctttttgaaatcgtataacaccctctgatgcgagaaatccgatgacaagctcttcgatatgctcaggcgtacaaacgagcgtcacaaattcactgccattcagtatcactgtcaaagggaattccgtcaccatccggtcttctactttgcttatttccccttgttcatagcgccatacatccctgaccgcagttactttatcgttcaatgtctcttcccctccgcaatgttcctgcctttatattttttcacactcctcggattttgtcgaattctgagacacaaaaagagccctctatataaagggctttcacaggatgtgatgacggcggtgtttaggcagggcgcctaccgttccttttataacacgtgagcaccaatgtgcattgacaacaaacgcggggtttgtcgacacgctgagagccctctatagaaaggactctatggttgattatactgattcttttttagaaccgtaaacagcacaatagctgcgatcaaggtgagaatgctgacaaaaaagaaggctgccagttttagaagaacaccaagcaatatgaatgcaacggtggctataagaaaaatcattccgaataatttcatatgttcaacccctttttagggtatcattcccgcccaaactgtttttaaaccaataaaaaaaggcgcctgggggagcgcctgatctttaggttccttactcagtaaatttttgtgcttctttttcccaagcctgttcgaactcatccgcactgttcgctgaaatatattctccgccgccagcgacagctgcttgtttcatctcttcattacccttgacatcaaagttgaagccaatgatgtttacaatcgtatccacatttgatgcacggagcttttcgatttctgccgcagggtctccgccgcacgtttcttcaccgtcagtgattaaatacaccacgtttttcccgtctgcgtcaaatgcctcaaattcttttcttgtgtctgcaagtgctttggcaatcggtgtccatccagtcggcttgagctcactcaatgaattgtcaaacagggatccttcatatggatgaaggccgtaaatagtttccgtcgtactgcacgaaagggctttaccggacagtttattattccctgcatgcccgaaaacgcgaagcataagatttgtatccttcggaagaagttcggcaaaagattttactgattttttggcaatgtctattttgcgctctcctcctgttttttgaaccatacttccgcttccgtcaaacaaaacagctacatttgtatcagcctgtttctcagcggcaaaagacggggaggcaatggaaacagtcaacaatccaatgataccggcagccagcaattttttcatatgattacttcctttctttttcatattttccaactatatgttggattcttctttatgctagaatacgaaaatgcaaaaagatataggacatgctgccttttgtgctgctttcacgatctgtccaaaatcgcttgaaatgccgttcatttttagccatttccgcccagaaagcataaacagattgtgtgatcattcattcttttttcgccttgattatgacagaaaaacggaaatctgctactatgctacaggcagacagctaattagttttgaagtttttgttacatacaaaaagaggctgaccatcaccagcctcttttttcttatttagataacattagtgattgctgagtgaaaattttctcaacatctttttgggtataagccgggaagtattcaccgccgcctactttcgcaattgcgttcagctggcctttgtatccctctttataatcaaagccgatcacattaacagtgatattgtctttttgcagttcctttgctgttttaatcgggtttcctccgcacgtttcctcaccgtctgtcaacagatacaccactttttccccttttgcatcaagctggtcaaaagaagatttcgcctcgttcagcgctttggcaattggcgtccagccagtcggcccaattgtattgagagaattgaggaagctttgctcgttaaagctttggaagccgtatacgttgcgaatggcttcacatgactgaacttttccggaatttttattgtttccttcagagccaaacacgctcattttcacctgagttccttctggcagtgagctcgcaaactttgaaatttcttttttggctgaattaaatttagatacaccgtctattcttttcgccatacttccgctggcatcaagcaagaccgccacgttcgccggcgctttagcctccgtttctgacttttcagctgcaaaagcaggtgaagttaatccaaaaagcaatcctgtcatcatgatcagtgaaaatcttttcttcatgttcgtacccctttaccaatttgtttctgcgtgcagatgttcaacgctgaacataatctatcgtaatcaacaaaaaccgagaaataaatagggcgggcttccccattgctgttgtttacttttgcatagaaacctatgtttttattagtgatttccacctaacgcccctatgaaaagagaagattgtccgcctttcggctttcgttatatgagtctgtcgaagtctgtcgacaaatgtggatgactttaccacaatctcaaagcctgaaatcaggaaaaaaggactgatccttaaagacggccagaagctcctctaaaccgtttcagccgctcttagataaaagacattcaagaacagaaaaagacgcccaaagagcgtctttttctactttttcgccatgtatttattcaaaaacgcatctgcctcagaaatttgtgtgccttggtaatagtactttacaatgtcatcaaccgttttgccttctttggccataaaattcgctccgtattggctcatcccaacaccgtggccaaatcctctcgtcgtgactgtaattgtgtctccatttcgcttccattcaaaatcggcggagttgagacccagcttttcacgtatgtctcttcctttcagcgtcttgccgttaatgacggcagttgcgacctggtggcccggtgtctcgccggtaatcttccctactgcgctagatccatccagcttgacgccaagcttttgctgaaattctgccgctgtaaaggttttcgttgccttatatttcggagactttttatcccatgggcttttgacgctttttaaatatgggatagcacttgtccaataagcttctgcattctctgtgtagccgttgcttgtggagaaaaaggatgcttcaatcggctggttgttgtacgttaagattttgccttgcgtactggctaccgcagctgtgattttcttcagttttgtctcatagcttgtgccccactgttttttcagctccgctttgtttttatacacctggaacatctgtgtatcatccaccagtgagcctttaggagcctcaaccgctgaatttgacaccatcagtctgacaataaatgttctggcggcgagggcctgggctttcagtgcttcagattcaaaggttgccggcatttcggaggcgacgactccaatcacatactcttcaagcggaatgttttctacggattgatttgcggttcgatagacgggaatagaaacaggtgatgctttcaatgtttctgctcctttcgatgctggtttcgtgctgactgctgtcttttctgattctacactggcccccgcttccttattatgctggaatggtataaccaagagtgtgggaaccaagagaatcaatgcacatagtacggatagtgtgattgcgaattgtttcatattcagctgcctcctgctcgggattcgactctagtctagtctatgggcagggacaagctaatatgactctcgttttggacagaaactttatttgtcatttacgtattcttttttgctattttgcgcataatgatgataatacacaaaaaataaaaaaccagtatgccagagtgacatactgattttcaagtaagtttatgcatttaagtcagaaacgacttctttattctcttgctcagaagcagactcatcatttacacgttcgatgtctgcgcccagagcggcaagcttctgatggaaatcaacgtaaccgcggtctaagtgcttcaattcagtaacacgtgtgtgaccttcagccactaaccccgcaagaatcagcgctgcacctgcacgcaaatcagtcgctgcaacttcagctccctgaagctgtacaggaccgttaatgatgacagaacgtccttcaatcttgatatcaccattcatacggcggaattcttccgcatgcataaaacggttttcaaaaacggtttctgtaatcatgcttgtgccgcttgcacgaagcagaagcgccatcatttgtgactgcatatcagtcgggaagcccgggtgaggcattgttttgatgtcaatcggtttaagctctttcgggccgatgacacgcagaccttcaccttcatccttaattgttacacccatctcttccatttttgcaattaaagaggtgaggtgttcaggaaccgctccttttactaatacgtttccttcagtgattgcagcagcaaccataaatgtgcccgcttcaatacggtctggaataatatggtgttttacgccgtgaagcttttcgactccttcaattttgatggtgccggtgccagctccgcggatttttccgcccatgccgttgatatagtttgctaaatcaacgatttcgggttcttttgccacgttttccagcgttgttgttccttcagctagagcggctgccataatcaggttctctgtagctcctacacttgggaagtccagataaatttttgcgccttgcagtcggccttttacttcagcttcaatgaagccattaccgactttgatttctgcgcccattgcttcaaaaccttttaaatgctgatcaatcggtctggaaccaattgcgcatccgcccggaagtgcaactcttgcatgacctgtacgcgcaagaagcggccccatgacaagcacagacgcacgcattttacgaacatattcaaaaggtgcttcagtttgcaaagcgtatgaagcatttacagtcacttcattattttcaaaatgcacatctgctcctaaatgacgcaacacttcgttaattgtatatacatcggagagcgtaggtacatcacaaattacgcttttttcttcacttgctaataaagatgcagcgataacaggtaaaacggcatttttagcgccttcaactttgactgtgccgtttaacttctgaccgccgcggacgatgattttttccaaggtattcccctccgcgtccctaaattctctatattaatattcagtcgtaacgattggtgtgccaaccgtaacggtatgttttccgcccattcctgcacttctaagtgcaatttgcaaattcattttatgtttcgaggtcataatgtactcttcccactcatctgtaaacgcagaaatagaaacgaaatttggctcaactacatgttctactgatcttgcttgaaattcatttaataactgatttgcttttttttgcaaaacaatattcatattatcatctaagtgaccatttagacaagtaaaaataactactttttcttggaatatcccaagtgtctcccgttcaaactgttcatatgtatcattccagctatccggtgtctctagactcatttgctcatataataaatacgaagttggattgtgttttttgagggttgtgacaagctgcagtctaaaagaagatcgattttttttgtcagtatatgtgccaattgcctttatcattttatcttcccgtgcaatcacccaatcatattgacgatactctgattttaaacgttgcactttttgataaaattctttttcggtcagtgacatgttttgttttgcatgcaatgtccacttatctattgacacatcttggcgttccatcccctctgccatttgtgctaacggcgttaattcactcgcatgaatggtatggaaaacagcaatgacgaagcttaacatgacggaaatgataatagcgcggcttacttgttttttcttcatgttcatctctcccccttatccccagttttaccggaggcaagaggcgccatacgtaaaaatcttcgtcaaaactcgagctattcgcttcattcaaaacctattaaaatagatagggaagctgctgtgaataattgagataatctaaaaagaaattggcaacggccgttccaatggcaattgtcagcaaaatcatcaggagtcttgcctgcacgactttgccttttttgattaacggatctatattgacggcttgcaacgcccaccaagtcactgctataaaaatcaggtgaacgacaatgccgattgcagcctgctgtcccaatacactcatctattacactcctttctctgcgttcataccctttcttattatataagaagcacagataaagatgatacattttatacagaacggaataatcacccaaatctagggctaatccccgcttaaagtgcgattcttttacatggtatactttattggaaaggagctggcaaatgtgaatcattctttttttcagcctgaaaagcaatatggtgaggacctgccaatttttgatcaggaatgggaagcaattgcattctattatgattatagacagtcacagattgaagaactgaatgaattgtgtcagttttttaacatttctcttacctatacgagagaaagccttgaagagcttgaaaacctctattttcaaagtatacaagaacttttgcttgctgattggaatcttcctattgaagaattcgagaaaatgatcagtgtttatcttatagattgtgtgattgcccgccatgaagatgctgaatgggttgtaaaaccttatccctataaagacggcgcttatacacttggctttagaagacatcgcaaatcgtggcatacaatgaatgcctgtgatggtttatacctgcgtccaaaagaggatcgcccgctgttatcgctgtttgattctcttgtgcgttcataaaaaaatccttctctttatgagaaggattttttcttatttccctgctacatccaatctgttcaaagcccgctgtaacgcaagctcagcccgacgaatgtcagtatcatctgattgagaattcaaacgctcctgcgcccgctggcgtgcagcttcagcgcgctctttatcgatgccttctgctgtctcggcagcctgggcaaggatggtgacctgatcaggacggacttcgacaaatccgccgctgacggcaaccatttcagtctgcccgtcttttttcagacggacagcgccgattttaagaggagccacggttggaatatggcctggcaaaataccgagatcgccgctttcggctctcacactcaccatttcgatatccgcatcgtatactgggccgtcgggagtaacgatattgactttaacggtcttcatgcttttaccctcctaggaccagattaaacttctacacccatttcttttgctttctcaacaacttcttcgatacggcctacaagacggaatgcatcttctggaagatggtcatatttaccggctaagatttctttgaagccttgtaccgtctcttttacaggcacgtaagatcctttttgtccagtgaactgttcagccacgtggaagttctgagaaaggaagaactggatacggcgtgcgcggtgaacgacaagtttgtcttcctcgcctaattcatccataccgagaatcgcaatgatatcctgaagctctttgtaacgctgaagcgttgactgtacttcacgcgcaactgcataatgctcttccccgacaatttcaggagcaagggcgcgtgatgtagatgccaacggatcaaccgcagggtaaatacccatttcagttaatttacgctcaaggtttgttgtcgcatccaagtgagcgaacgttgtcgccggcgccgggtcagtgtagtcatcggcaggcacgtagatcgcctggatagatgtaactgatccaacgttcgtagacgtgatacgctcttggagctgacccatctcagttgcaagcgtcggctgataaccaaccgctgaaggcatacggccaagaagggctgaaacctctgaacccgcttgtgtgaaacggaaaatgttatcgatgaagaacagtacgtcctgtccttgtacatcacggaagtgctcagccattgtaaggcctgtcaaagcaacacgcatacgtgcgcccggcggctcgttcatttgtccgaataccatggctgttttgttgattacgccagagtcactcatttcgtagaaaaggtcgttcccttcacgagtacgctctcctacgccggcgaatacagagataccgccgtgctcttgcgcgatgttgttgattaattcctggattaatacggttttacctacaccggcaccaccgaacaatccgattttaccgcccttaatgtaaggagcaagcaaatcaacaaccttaatacctgtttcaagaatttcaacttctgttgaaagctgatcgaatgaaggcgcctgtctgtgaatcggatcctttttcgcatccgcaggaaccggctcattcaaatcaatattttctccgagaacgttaaatacacgtccaagtgttacatcaccaaccggtactgagattggcgctcctgtatctacagcttccataccgcgctgaacaccatctgtagatgccattgcgattgtacggactgtatcatcacctaaatgaagagcgacctcaagcgttaaatcaatacctacttcgttttcacttgcagctggctgtgaaattttaatcgcattataaatttcaggcaagtgaccgtcttcaaaacgcacgtcgacgaccggtcctaatacctggctaacgcgtcctttcttcatcgctatccctcctgacaaaatctttctattctaaagcggctgctccgccgacaatttccgtaatttcttgtgtgatggctgcttggcgagcgcggttgtaagaaagcgaaagtgaatcgataagttccttcgcgttgtctgtcgcatttttcatcgccgtcattcttgcagcgtgctcacttgctttactgtcaagaagcgcaccgaagattaagctttctgcatattgaggaagcaaaacctccagaacctcctcttcagatggttcaaattcataagacgccgttctttttccgccgccgctgcccaaatcagataacggcagaagttttttctccgttacttcttgagtaatggcgctgacaaaatggttataaacaaggtgcaattcatcaaacgcaccgtctataaacatttgaatcgtttgacgggcaagatctttaatttctgtaaacgttacttcatccccaagtcctgttaactcggaaatgatcggaatctcccgtttcttaaagaaatcacggcccactcttccgatggcaatcaccgcatactcatccttagactgatgacgttcttgcatggcctgataagcactccgtaaaaccgaactgttaaaagcgccggcaagaccgcggtcagacgtaatgacaaggtatgccgtttttttcacttctctgctgagaagcatcgggtgcttcacgttgccggaaactcttccgacgtttgacacaacctcttggattttatccatatatggcacaaatgattttgcattgttttcagcacgattcagcttagccgcagataccatctgcatggcttttgtaatctgacttgtttttttcgttgacgtgatccttgacttaatatcgcgtaatgaggccaaagatttcaccaccttttctcttcatctgcgtaaaaagagagaaaaagagaacctttttctctcatcagcattcgagttagttgcttggtgcaaatgtgcgtttgaagccttcgattgcagcattgaagtcttcatcagcaggaaggtttcctgttttcgcaattccgtcaagcaggtctttatggttttggtcaaggtacatgtagtactcttcttcaaaacgtctgatatccgccacaggaatatcatcgagatatccttttgtcagcgcataaagaatggctacttgcttttcaaccggaagcggcttgttcagatcctgcttcagcacttcaactgtacgcgcaccgcggttcagttttgcctgagtcgcttggtcgaggtcagaaccgaattgagcgaatgcttccagctcacggtatgacgcaaggtcaagacgcaaagtacctgatacttttttcatcgctttgatttgcgctgagccgccgacacgggatacagacaatccggcattgatcgctggacgtacgcctgagaagaacaaatcagattgcaggaagatctgtccgtcggtgatggaaatgacgttcgtcggaatataagcagagatatctccggcttgtgtttctacgaacggcagagctgtaattgatcctgcgcctttcgcgtcgctaagctttgctgcacgctcaagcagacgggaatgaagatagaatacatccccagggaacgcttcacggcctggcggacggcgaagaagcaaggacagctcacggtaagcggccgcttgtttagaaagatcatcgtatacaacaagaacgtgcttgccgttgtacataaattcttctgccattgtaaccccagcatacggtgccaggtacagaagcggtgccggctgtgaggcagacgccgttacaacaattgtataatcaagcgcgccgtgtttacgcaatgtttctactacgccgcggactgttgattctttttggccgatcgcaacatatacgcagatcatgtcttggtctttttggttcaggatcgcatcgatcgcaacagatgttttacctgtttgacggtcaccgatgatcagctcacgctggccgcggccgattggaatcagtgcatcgatcgctttgataccggtttgaagcggttcatgaacggatttacggtccataacgcctggtgcagggctttcaatcggacgagttttgcttgtaaggatcgggccaagtccgtctaccggttggcctagcgggtttacaatacggccgattaactcttcaccaacaggaacctccatgatgcgacctgttctttttacttcgtctccctcacggatctcactgaaaggtcctaagatgacgatacctacgtttgattcttcaaggttttgagccatacccaaaacaccgtttgaaaattcgacaagttcaccggccatacagttgtcaaggccgtgcacacgtgcaataccgtcaccgacttggatgactgtacctacgtcttgaacttcaatatcagattgataattttgtatttgctgttttatcagcgtgctaatctcttcagctttgatgctcacttaggtttcaccccttctatcgattttccccggctaattgacgttcgatgcgctgaagcttcccgcttacgctgccgtcataaatccggtttccaatgcggactttaatgccgcctattaaatccgtctgcacttcatttctgattctcagtgaagcgactccggctttttttgcaaacacttgtgataatggtaacatttctgcatccgtcagcggtttcactgaatatacgattgcgtcttctgtttgacgggccacatttgcgagtttgataaactcatctgtgagctcagggacaatcgcggcacgatggcggtcaatcaaaagaaaaatcgtattgagtacggactgtgacaaagagccaaatgcattttgaatcagctcttttttcttcgcagccggcaccttcggatggttcaacacatcattaagcgctttttcattttgaaatacttgttttacaacaattagctcttcttctacttgattcagctgagcggactcattggctatatcaaaaagagctgatgcatatcgtttagagacagctgatccactcatcggctttctcctacctctttaagatagtcctggatcaatttctcttgcgcttgttcatccagttctttttcgatcactttcgacgcaatcatgacagaaagagacgctacttgctcacggagagcagaaaccgcctgttccttttccttcacgatttcagttcttgctgcttctttcagacgttcagattctgcacgtgcagcctgaataatctcttctttttgcttctctcccagtttctttgcgttttcgataagagtttgggattcctgtcttgcttcttttaaaagaacgcgctgctcttcaatcagctgctgcgcttctttatttttttcttcagcagacgtaatttctccagcgatgtggtcttcacgctgtttcattatgtttaatagcggccctaaagcgtatttcttcagaagcgctaataagattaacatagctaacagttggaacaggatatctccgccgttaaacgacaatcctagttcaagtggtaattgagacatctactacggcaactcccttctgcaggtttttctttgctgatccagcagccgcacttgtctcttttcagccggcaaggcgggatgcttatcagacataaagcaatggcgaaggttctcttggaatgatcttcgccatttttagttcatataaggcttttatgcttagccaaagaacgctaagaatgcgataacgacagcgataataggaagggcttcaactaatgcgatacccatgaacataagagttctcagttctttacctgcttccggctgacgggcaatcccctctaccgtacgtgaaacaatcaaaccgttaccaatacctgcaccaagtgcgcctaaaccaattgcaatcgcagctgctattaaattcatgaaaaagttcctcctttaaaatgttatccgtttggatataatgttttaatgatcatgactgattttatgagacatgtacaccatcgtcagcattgtaaagataaatgcctggatagcaccaataaataaactgaatgcttgccatgccagcatcggcagaatggcaccgattgtaccgacaagaccgagagccacgctttgcgaataatggcttgttgctaatcccgcaagcaggccgagaagaatctcaccggcgaagatgttaccatacagccgcaaacctagagtcagcgtattcgcaaactcttcgatgattttcatcgggagcatgaatggaacaggtcttaaatagtctttggaatattccttgagccctttcatcttcacaccatagtagtgggttaaagcaacaaccatcacggctagcgttaatgtaatggcaggatcggctgtcggagacttccaccagagctcatgtccgattgtaatagagaacggcagccccagcatattcgacacaaatatgtacatcagcaatgtgacaccaagtgccaagaagttagcccctgtttttaaatccattgtactgccaataatattgcggacgaaatcaacaatccattccataaagttctgggcttttccgggacggatcgaaagcgttcttgtcgtcaatatagcaatcaataaaacaatcacactcgccacagtaatcatcagaatgtttgtcagattaaaagtaagacctagaaattctatagttctgtaaccatgattcaaagggttttcacctctcttccattgatgaacgtttaagctggataaaggaatctatcataatgacagggtatattgtcattaatccaataactgtacttgccatatgaaagtattcgggatttttataggcaacagccacagcaagaatcgcattgcaccaccgcgctgcgctcccgagagatcgtatggactttcctttctcaacagctctgtcaaaagcattcattcttctgacgagcagtaaaaaattaaacaaactgaaaacagttcccagaataaggcctaaaaaaacggttttatacgctgttaaaccataacccagtacatacactgccaaaatgaacaataaatatttgcgttgtctgctaaatgtaagcttgggatcgtccatcaattatctgtctcctgatgaaaaaataatgtatagcttggatacggcaaaaatcagcggttaacccttagtagaagaccttttttgaccggcaaaacgggcctgttcgaaaaaatcattcatccgcaagccttgcagggatgctgtttcattcgcttaaataaatcctcataatacgggtttgctgagaggatttacattgaggatgaggactataatgaaagctatgaaaaccttctcataataccctcgtttagcatacaatagcccctaacatgtgtcaatctgtttaaagttaaaaaactttttatactttacgtctccacagaatgttcacattttcacctataattgtatacagattcaccgaatagcaaaaaactggataaaaaaatgaaacccccttttggggatttcattttttattttgttccaaacatgcgatcacccgcatctccgagacctggaacaatatatcctttttcatttaatttttcatctagcgccgcaatgtaaatatcaacgtccgaatgatgcttctgcaattcttccacaccctccggcgctgctacaagacacatgaaacggatatttttcgcaccgcgttttttaaggctgtgaatggcttcaactgcggaaccgcctgtagcgagcatcgggtcaaccacgatgaattcacgctcttccacatcagaaggaagcttgacatagtattccacgggttttaaggtttctggatcacggtaaaggccgacatgtcccacttttgccgcaggaatcagctttaaaatgccgtcaaccattcccaatcctgctctgaggataggaaccactccgagttttttccctgagatgactttcgatttcgcagcctgaaccggtgtattgatatccacttcttccagaggaagatcgcgggtaatttcaaatgccatgagtgtagccacttcatctactaactctctaaaatccttcgtacctgtattttcattccgtatatatgtcagcttgtgctgaattaaaggatgatcaaatacataaacctttcccatactgtgtttcagctccttttttattgtcccatcaacaattacacacttctattgattctacaaaaaaagacattgagtttcaagaacatcgtcaaaaaacccgccgggcataagccccagcgggttttaggatcttaataatctaattctttatataaaggaaatttatcagtcagagcagctacacgctgtcttgcttcttcaagttttccttcgtcttcgtggtttttcaatgcaagcgcaatgatagcaccgacttcttctaatgcgtctccgtcaaaaccacggctggttacagcagctgtcccaagacggatgccgcttgttacgaaaggtttttcaggatcatatggaatcgcgtttttgttagacgtaataccgatttcatcaagtacatgctccgcaaccttaccagtcagtccgagcgaacgaagatcaacaaggataaggtggttgtctgttccgcctgaaacgagctggatgccctctttcgttaaggcttcagccagacgtttcgcgtttgaaatgacgttttgtgcatatgttttgaaatcgtcctgcaatacttcaccgaatgaaacagcttttgcggcaataacgtgcatcagagggccgccttgaattccagggaagatcgatttatcaattttcttgccaaactcttcacggcaaaggatcataccgcctcgaggaccgcgaagtgttttatgtgttgttgttgtaacgaaatcagcgtaaggaaccgggtttggatgaaggcctgccgcaacaagtcctgcgatatgtgccatatccaccatgaagtaagcgccgacttcatcagcaatttcacggaatttcttaaagtcgattgtacgaggatacgcacttgctcctgctacgataagcttcggtttatgagcgagggctttttcacgcacgtcatcgtaatcaatatattgagtttctttatctacgccgtactcaacaaagttatattgaacaccgctgaagttgactgggcttccgtgtgttaaatggccgccgtgggagaggttcatcccaagtacagtatcgccttgctccaaaatcgtgaagtacactgccatgtttgcttgtgcgcctgaatgaggctgaacgtttacatgctccgctccaaagatttccttcgcgcggtcacgggcgatatcttcaacgacatcgacgtgctcgcatccgccgtagtagcgtttgcccggatatccttctgcgtacttatttgtcaaaacagatccttgtgcttccataactgcttcacttacaaagttctcagaagcaatcaattcgatcttagtctgttggcgttcacgctcatttttaatggcgttaaacacttgttcgtcttgcgcaggtaaatgtttcatcagcgagatcctctcctatccgtatcctgttctttgtttttaccatcactattgtacatggtttttaaggccgatgtaaaagattatttttaaaaaatctaaatttttattggtaaaaacgaatattaataacttaaatttaatttaaagttcggaatttatttcactgtcttaaaataaaagaaaagactggctatgcagtcctttcattcacactcataaaccgcccgcactccgccgattagtttcggccgtgtacgcgccaatgtcacatgagctgaaccgaggctgttttgagagacacgcatagggacagccaccggcttcagatgcatgccgataaacgtatcgcctatatcaattccggcgtcagcctgaatggtttcaacaagaacaggagacttcatctgcttaaacgcataagacgccatcgctccgcccgcttttggaacgggcacggcagaaacggttggaagcctgaacagcttggctgtttctgcttcgacgacaagcgctctgtttaaatgctcgcagcattgaaacgccagatggattcccgttttttcccggagctcagcaagtccgctgtagatgctttcagcgatatctacactgcccgatgtgccgatccggctgccggccacttcgctcgtgctgcatccaaggacgaagagctgatcttgtttcaattccgcttggtcctgaaactcagacagcatcgtcttccacgtttgtttcaactcattcattaaacagcacccctacaggtttttctcttcataatcggagatttttccaatacgcgtttggtgtcttcccccggtaaactcagtagtcagccagatttttgcgatttcccgagccaaaccaggtccgatcacccgttcacccatcgcaaggatgtttgtgtcattatgctccctcgtcgccttcgcgctgaaggtatcgtgcgccagcgcgcagcgaatcccttttactttattagcggaaatgctcatgccgatgcctgtcccgcaaattaaaatgcctctgtcaacttcgccgctaaccactttttcggccaccggaaaagcataatccggataatcgacagagccgctgccgcagtcacagcccatatcaatatattcaatttgcaattcgtccattaactctttgatttcatttcgaatgtgaacgccgccatgatccgatgcaatggctactttcatctgcttttcctcccagcgtgtgtgatgcggcccgcccgctttattgaccgcgcagcctgtccgctctttgattcacaccatatgatgtgcttttcactatattctactccttcacgcaggatttgcaaatgacctgtttgcagattttctgacaacttatctacggtcttttttcagctgttttgccagctgccgaagaagctcttcaagctcatctcgcgtttgtttatagatgtcaattgagccgccgaacggatcgaggacatcaccatggctgcctgtgacatattcttttaacgtaaacactttatcacgataacgtccaaattggctggcaatgatctgtttgtgctgatgggtcatagccagaaccaaatcagccgattccataagttcttcagttaatggagaagacacatgattaagggcaatgtgtttttcaaacaacgcttcgactgcatgaggcgtcgctttcccattaggtgaagcaaacacacctgccgagcggacattgacattcagcccttccatttctgcaattgatttaaaaagcgcctcagccattgggctgcggcacgtatttccagtacagacaaaaataatatccatgtcagtcaccccttatttttctctattatatatgaagaaaaaagaaacggcgacttcgtttcttttattggtatattaaattggcaaaagcagctttaatccaaacacgattaatatgatgcccccgagcgcttcgctgtatgtgccaagccatgactgcacttgttttccgaccagcaggcccagccatgtcaacatcatgctgaacagcccgaacagggtaattgtgaggagcggatgcgagccgtatatccccaagctcaagccgacggaaaagctgtcaaggctgacgccgatggcaaacagcaataagcccggccctgccggtgacatgaatcgttcttctgactgtttaaaagaggccataagcatttgaaccccaagaacaaaaagcagcgccccaccgatataaaccgctaacacgccgaggagccctgacagcatgttaccggccgccatccctgcgagaggcatgatgacgtgaaagaggccgatgatgaaaccaatatagaatatctgcttctttctaagtttgaccatgcccattccaaggccgacagaaaaagcatccatccctaaagcaaacgccatgatgcttaatgtaatcagttcgcctataaacaaatccgacatacataaataacccccttggacacgccccgcttttttagcctatgcgtgtccaaaaagggttagaacatctgactgctttcagcgaatcactcttcctccggcggctttcatcagcctgttcataatagcaagaccgacacctgtatccggaaaggattccgctataatgaaatccaccttattctcatcaaagctgcgcaaagcatcatacagccctgccgcaacagtctcaagctgagcccgtcttccgcagctcttcacataatcagcggaataaacgcccgcgttttcttctgtcgtcaggacaccgacccgtcttccgccctgttgatattcttgaatgaggtgctgaatgcgctctgggctgccttcgcaaatggcaagaggcgctgtcggcgcataatgtgtatatttcatccctggagaaatcggcttctcgttttgatcgctgagccctttatccacatggatcggcccgatcacggcctcaatttgttccttcgtaatgccgcccggacgcaggagaacagggatgtcgtccgcacatgaaagcacagttgattcgaccccgattccggtagggcctccatccataataccggctatgcggccatccaagtcgtgagccacatgctccgcttttgtgggacttggcttgcctgatagattggcgctcggtgctgcaatcggcagtcccgattcgcgaatcaatgcaagggcaagcggatgatccggcattctaatggcaaccgtttcaagacctgccgttacacgaggtgaaagcgcatcaggtttgcaaggcagaatgagcgtaagtgctcccggccaaaaccgtttcatcaatgttttcgccttttccggcgccgggcccgttaaatcctcaagctggctgatatccgcaatgtggacaatcaggggattatcgctcggccgccctttcgcctcatatatttttttgacagcatccgtattttttgcgtttgcgcctaggccatatactgtttctgtcggaaaggcaacgacctcattttctcggagcaaagcggctgcttgtgcaatttgtggatcatttgtggataactcgtcagttacatccacaaaccatcttttcgttttcatttctgaccaaactccttattcacaacaataaaacgattgttttacgcgtgtaatccttttgaaagtataaaagatgtcctgtaataaaacaagcgttatccacaaattgtggacaacgctaataaagaagtggataagtatgtgtataaactgcacttatccagacgcttttttcatcaaaacggccccttctgtttgccgcgattcacagaagtgatcagaagaaaacagctcctccggtacactttcagctctttcaaaacccatggccgtcagaaagtccgcagaggaatgctgattcgctactaggtacacggttttgatctgatgcttttcgcacagcacctccatgctttgaaaaagcgtgacgatgtggccttggtgaagcttgtccgatatgacaagtgatcgcagcagcccctggtcacagctgattttttcaataccgaggcatccggcaatgtttttctcactgtcctccagcataagaaattgagtgaagccttctttcacgccttcatagctggttttcgcctgttttaaaaattcctcgagcacatctccgtctttttcccttgccacccgcagttgataaaacatccgttcaccccgtttttgcgttctttcttccaatctatgaggcaaatctatttttagaccagatgattaggaaaaaaggtcggaaatccattcgactaaaaagaatttcacttctgtgccgtcttctttttcttcattctcttcttttttggctttttccgctttagcggttacgtcctcaagcactttttcagtctgcttttttgaggcttctttatcttcttgttctttgacggcttccccgttagaaaaatcgagaaagcagaggggcgggaacagcacacaccaccagttggcgccgtctccgtttccaagcgtaatcaaaatcgcttcatactcaccggcaggatataccatgttgccgtaaagctttgtcggaaacgagattttgtcaaaatcaacggatatcgactgattcgctccttctttctccattgtttcctttgcaattgctttgatttcaggcagctttgaacgaatcacgcgacgcgcttcttcaatagaagtaatatcctttacccaagttgtgatttctttattcaccgcgtctcttatatgacgttttaattgctggtcttgatcactatcgctgtttgccaatattctcaaacgaatcgcctgatccggtatgaccaccggctgattttccgatttctgtgccgtctcttcttttgccagccctacgagcgctccagataataaaagaaagatatatatacaaatgattactgtttttttcatcggtccccaccgttcctctccgtgctttgtttctagccctattatggacaaggagagccgggggtaaacgtgcagggtgaaaaaaatctagcaagctgttaatcttatttatggtacgatagtgttttaggaggtttaagatgaaatacaattatacagtgctgttatcagcattcacgatgtccgttctttattcagtaatttatattcattcatttatcattgccgctctcatcacaatggcattttattttctgtttccttatttgatcttcgcactgccgcttcaaatcatgatgaataaaaagccgaaacggttcagccctttgtatctgctgtattaccttatcgctgcttttattgccaacgcgatcattttcggcgtgcttcagccttcgggacaatctttgtttcaaaatacagccttttatcttttcgctgtattaacagctcttatctattggatatgggattctgttttactgcaaaaaaaggaagcctaagaggcttccttttttattaaaacaaaatcgtcagcaaataacatagaatggaaggtatcgccgcaacaaagaaagcggccgccattttcatgcgagatgtacggccttctttggtttcagaatggtagtttgcccgctgatcgcttccgcttacagccaaacccgatgtaatgatcgcgagccccactaaaacgagagacgcaacgccaaaaatcgcttcatatgaaagagcctgcggaaaaatggtgccaatcatgctctcaatcgcaatgagcaggattcctgctgtcagggcctttttcatgtttacatcccctttgctggtgttaaacagcttgatccattcactcgccagcaagctgcttatttatttttatgaatcagagcgcatatggttctgtcttttccattaatatctttcagcacttccacttccgcccccttaaacgccttgaggatcaggtctttgaccgccgctccctgtttccagccgatttcaaaaacgacaaatactttatccttcataacaagcggaatgtcttccataaaccgcttataaaatttcagcccgtctccgccatcggtgagtgcgtgcagcggctcatgaaaacggacaatttccgataaatcagccatttcttcctctgaaatatatggcgggtttgagacaatgatatccgctttttttcccgccttaataaaaggctcaagcagatcgccctgataaaagcgcacattcgctccgagtttttctgcattggcagaggcgacttgcagcgcctctttcgaaatatcgaccgccgacacagaaaagctttggttttcaagcgcaagcgtgacggctattgcgccgctccctgtaccaacgtcaacaacttcaagcttgccgtcttcagaaaagacactccgatatttttcaagcaaatgaaagacaacttcttcagtttccggccgcgggatcagcacatcatcattcaccataaattcccgtccataaaaaaactcttttcctataatgtattgaaccggcacgccctctttatgcatctcaacgtgacgcttaaagcgatacagttcgtcttcaccaatcggttcctgtaagcttgcgagcagtttgcttctctccattccggtatcataaagcaataggagctcggcagcattttcttctcttcccgcttcggttaaataagaagaagcccatttcagggcttcgaatatcgtcttcatcttaaccttccgactgctgaagcttgcttgcctgatcttcaacaatcagcgcttcaaccacttcgtcaagttttccttcaagaatctgatcaagcttttgaatcgtcaaaccgattctgtgatccgtcacacggttttgcgggaagttgtatgtgcggatacgttcagagcggtcaccagatccgactgctgatttccgtgtttgatcatattcagcctgggcttcctgctgaaatttatcatagattctggcacggagaaccttcattgctttttctttgttcttaatttgagatttttcatcctggcatgatacaactacacctgtcggcaagtgagtcagacgaaccgcagacattgttgtgttaacgctttgtccgcccggtccgcttgaagcaaacgtatcgacacggatatccttctcatggatgtcaacctctacctcttctgcctcaggaagacatgctactgttgcagtggatgtatggatgcgtccgcctgattctgtttccggaacacgctgtacgcggtgggcgccgttttcatatttgagtttagaatacgcgccgcttcccgtaatcataaagatgatctctttgtagccgcccgttccggttacattcgcttccatgacctctgttttccagccctgaagctcagcataacgggaatacattctgtacaggttgcccgcgaataaagcggcttcctcgcctcccgcagccccgcggatctccataataacgtttttgtcgtcattaggatctttcgggatcaggagcaccttcaggcgttctgacagtgtttccgtttccttctgaagttcagaaatctcttccttcaccatgtcgcgcatctcagcatccagcttctcttcaagcatcgcttttgcatcagccagctgttctgacgcatctctgtattgtctatatacgtcaactgtttcttgtatatcagattgctcttttgaatattctcttagctttttcggatcgttgactacttctggatcgctcaaaagctcatttaatttctcgtatcgttcttcaattgattttaaacggtctaacacggtcttcacctctgttttcctgtgcgtaacattctcattatagtatagtgattaaccccagtcaaaagcatttcaatcccagctttaaaagcctcctctgctatactgggaatcgaggagggatattgttgctgaaatccatacatcatattgcaatcatatgttcagattacgaaaagtcgaaagctttctacgtacataagcttggttttcaggtgattcaagaaacgtaccgcgaagagcgcagctcctataagcttgatttgtcgcttaacggctcgtatgtcattgagctgttctcgtttcccgatccgcccgaacgacaaacccggcctgaagccgcaggcctgcgccacctcgcctttacagtcggtagcttggataaagcggttcaggagcttcatgaaaaaggaatcgaaacagagccaatcagaacagacccgctgaccggcaaacgtttcaccttcttttttgatcctgaccagcttccattagaactgtatgaacaataacagtttttgaagaaaaaaaggagatacccactttctttgccgaatcttttcttgttttgtctaacgggaagggaacctcattctatggtcgaatacctagcttaaaaggaggtatgggatcatgaatacaaatatggtagcaagtgaactcggcgtctccgcaaaaacggtgcagcggtgggtgaagcagctgaatctaccggccgaacgcaatgagctcggacactattcgttcacggcagaagacgtgaaggttctaaaatccgttcaaaaacaaatctctgaaggcacggcgattcaggatattcatctgccgaaaagcgctaaaaagcgcacaggcttccttgtccaaaaaacaaatagcgacacagaacgaagaatcgagcagcttgaacaaaagctggacacccttttacagcaaaggcaggacgaaagtgaattgatggcaagaatgtcggaactggaacgccagctgaaacaaaaagccgatgaaggtgtatcttaccagctgcttcagcaccgcagagaaatcgatgatattcttgcagatctgcaatcactgacctcacaaatgaaagaattcaccgctcagccgatccccgagactgctgctgcttctgaaaaaaccaaaacaagaaaaaaaccgctgctgtcactgttcaaatttcaaacctaaagcaaaaagctccccgtaaagggagctttttttgttacgcagtaagcgcgataatgattggaagtgaaatcaatgacagaatcgcactgaccacaaacgcagttgcagtttcttcttcttgtttctcgaaacgagtcgcaatcatggctgcaacggcagaaccagggaatgcaacaagaaggattgcttttgttgtttggtcagccggaagtccgatagcaagagcaatcaggaacattaatgcaggctgaaccgcaacttttagtaacgcaataccgatagccggcatactgagtttaattttacgaataccaacggtaacaccgacagcaaagagagcaacaccagatgttgtgcttccaagctgatcaagcattttaacacccagctcaggaagagtgaaattgaaaaccagcaccaagatcatactgattaacggagcagctgcaagcggctcacaaagaccatgcaggattgattttcctgtcatcttccagaagctgtcgccactctcttcgtttttcttagaagactcaccaacagtagcgataatgatcgcgagcggatcaagaatcgcgttaaccacgatacctgtgaccgcgatcggaatcgcaacttcattcgctccgaataagcttcccaataccgggatacccataaatgcgaatgtcggctgtgcagagttcaaagaaaatacagatgagttcgttaaatcatacttgaaaataaatctgcaaaccaaaagaatgatgatatagaaaccaacaatcccaataattaaagaaatcattaaaggtacttgtgataaaaattcacttctggaagttgtcaaaataccagcgataaagtgagctggaagtgcgtatttcgttactaacgtacttaccccttttgccgacttggcatcataacttccaaaatgtcctgcaaaccaccccagcacgataacaaagaagatcggcgccaggaggattaagatatctaagatgctcaaaatattctcctccaaatcctatgtccgtatactttagctttacaaaaagctttccctcggacagaaaaatttactcgctaattatttcgcgatgacttttttgtattcaggtgtccacattgcttcaagtaccgcttgtttcacatcttcaggctgacgatttgccacgccgtctttaattgctgcttcagcaacggcaatcgcaacttggatagaaacctcttgaagcttatcaatgcttggaagcaatcctgctccaggtgtttcaagatcaaccatttcagcaatcgcatcagcagttgctgcaaacatagcaggtgtaatgatacgcgcttcagctacaattgaaccaagtccaagaccagggaacgcgaatgcgttgttagattgtccgatttcataagaaacaccgttgtattctacattgtcaaatgggcttcctgttgcaataagcacttttccgtcagtccatttgaacagatcttcaggaacagcttcagcaaggtgagtcgggttagacatcggcatgataaccggacggtctacgtgagatgccatttcttttacaatttcctctgtgaatgcacctgaaacccctgaagtaccaatcaagattgttggtttcgcttgacgaacgacttcatcgaatggaatttgacctttttcatcgcgcttccagtctttcacttcatccgcattgcgaaggtaaggtttttggaaatcaaggatgccttcgatgtcttcagtcagcaagcctctgtaatcaagtgtgtagaaacgtttgttagcttcttcttcagataatccggctagcaccattgtgtcacggatttggtcagcaataccgataccagcagaaccagcaccgaagataacaacacgctgatctttaatagaagcgccggttttcttcatagcggcaagcacacctgcaagtgtaatcgcgccagtaccttgaatatcatcattaaatgtcaggatttcatgattgtattttttcatgatgttgcgtgcatttttgttgccaaggtcttcccagtgaagaagcgctttagggaagaatttcaatgcagcttttacataagcgtcaatgaaagcttcgtagcgttcaccttgaacacgttcatgcttgttaccaatatataaaggatcgtttagaagtttttcgttgttcgtaccgacatcaagcacaaccgggataacacggctagggtcaataccagctgcagcagtgtaaacagctaatttaccgattgcgatattaataccgcctacaccccagtcaccgataccgagaatgctttcagagtcagtagcaacgataagatcaatatcgcctgctgtcgcgtgaaggttttcaaacgctttttcaataccgtcaatgttgtcgattgacaagtagattccttgaggtcttctatattcatggctgtactcctgaatcgcttcaccaactgttggtgtgtacacaacaggaagcatttcgcgaagatggtttttcagcaatttatagaaaagaacttcgttacggtttgcaagatcacttaagtaaacattttgacgaaggcggtcaggctgcgcttggaattgctcgtacgcgcgttgtgcttgttgatcaagagaaagtacagttggcggcagaagcccttctaagccgagttcttgtctttcttctagtgaaaaagcaacgcctttatttaaagtaggaatagataaaacttcttttcctctaagagttgtttctaagtggccttctttcgttttttttatgttattcaagcaaatctccttctttcttgaaatagttaaccaagttaagtaataacccatctaaaatatgaccgatcatgatctttatgcgactttgtgacaattattcgaacaatgtctcaaaactatttacattacgtaagctattgtatgcctgtcaaaatcaaaattcaagggaagaaaattacttaattttttaatatacttatttaaattttttaattgcatattatcagaatataaaaaaaacaccggtgtttttagccggtgcattctatctttatacccatgttttggactattttttagatttacctgggacttcgtgatgatgtctgcatcttgcttcatatgattcagatgcaccaaccaaaatgaccggatcatcgtaagaagcaggtttgccgtcaatgaggcgctgtgttctgctcgccggtgatccgcaaacagaacagacggcttgcagctttgtcacactttccgcaatcgccatgatattcgggacgacaccgaacggctctcccctaaaatccatatcaaggcctgctgctatcacacggtagcctttatcggcaagagatgataaaacctcaacaatttcctgatcaaaaaactgcacttcatcaaccgcaatcacatctgtactttcactgatgtgatcccaaatgtccgcagcagacgaaatggcatagctcgtcatcgatgttccattatgggagacaacagcagcttcgctgtatcggttatcaattacaggcttaaataccctgacttcctgcttggcataagttgctctcttcactcttctgatcagctcttcagatttccccgagaacatgctgccgcaaatcagctcaagccacccgctttgtttcattatgtacataggcttcgctcccctctctctgccagctgtgttttagacaatataaaaaacaggcaagactgctgcttgcctgttgagaaatctattattacttaagaccgtattttttgttaaagcgatcaacacgaccatcagcagaagcgaatttttgacggccagtgtagaatgggtggcattcagagcaaatctcaacgcgtacctcttcttttactgagcctgtttcaaattcatttccgcaagcgcatttaactgttgcttttttgaaattaggatgaattcctgctttcattgtatccatctccttccgccctgaatcccgtgtggaaacagagttattatttcggagcattgtccgaaacgcatatgagaaaattatatcagtgatttacttcttttgcaaatacaatttaccttcttgcagatgatagatttgcctgtttccattcttgattgagaatatcgaaaaattcctggtttgttttggtttttttcatttttctcatgaacttttctgcgaaatcaggtgaatcagacatcgttttgcggatagaccataaacgatcaagatgctctttaggcacaagcagctcttctttgcgcgttcctgaacggcggatatcgatagcagggaagatgcggcgctcggcaagagagcggtcaaggtgaagctccatgttgcctgttcccttgaattcttcataaatgacatcatccatacgtgaacctgtatcgaccagagccgtagcaaggatggttaagctgccgccctcttcgatatttctcgcagccccaaagaagcgtttcggacggtggaacgccgctgggtcaatccccccggaaagcgttcttccacttggcggaatcactaagttgtaggcgcgggcaagacgtgtgatgctgtccatcaggataatgacgtcttttttgtgttccacgagacgcatcgcacgttcaagcacaagctcggccactttgatatggttttccggcacttcatcaaacgttgagctgacgacatccccagctacagagcgctcgatatcggttacttcctcaggtctttcgtcaattaaaagcacgatcagctctgcttcaggctggttcgctgtaatgctgttggcaatttccttcagcaacatcgtttttccggctttcggcggcgcaacaatcaatccgcgctgcccaaatccaaccggcgccatcatgtccataattcttgtagacaagaagttcggctttgtttcaagcaccatttgacgatccggataaagtggcgtaagagccgggaaatgcacacgctcttttgcagattcgggatcatccccatttactgcttcaacgtgcaaaagtccatagtaacgctcattttcttttggcgggcgaaccttgccagatactttgtctccgttccgcaaatcgaaacggcggatttgtgaagctgagatgtaaatgtcttctgagcttggagagtagttgatcggtctcaggaatccgaaaccttcagactggatgatctcgagaacgccttccataaacagcagatcttcctgttctgcattcgctttcagaatggcgaaaatgagttctttttttgtcagtttgctgtaataggagattttataatgtcttgcaagttcataaagctctttcaatttcatattttccaaagaggaaatagatacgtctttcataaaaacaccacgcttttcatagtcaatatcttactctgaacatgtcatctgctgcttttgcacaacatccgccaaagcacattctttttttaacataaaggaacttctatcggtaacacttccacccatgatcggcgcttttgttaaaaggattgtcttaatgagttttgaaggaagcgaggacaaaaacatgagaagatcaatacttatatcgtctgtatgcggtagaaattgaaactttcctagtgcttaaaagaaggtattacgcagtaaaattcgcagcactctttatttttaccttatttcaaaaaattattcaactgaaataaggttttgacacggaattgatagagttgacgcttttctgcaaaagttaaagcgggctcacacccgctttttctgtttgttatggacggattacaagatttggtttctttttcaagctgtgtctgccgtcaacgaaacgaacagtgcccgattttgcacggataactaagctttcagttgtaccgacagagcctttgaattgaactccttttaacagctcgccgtcagtaacccctgtagctgcaaaaatcgcgtcatcacccttcacaaggtcttccatgcgaaggactttgcttaaatcaaggcccattttgtgacagcgagtgatttcttcttcgctttgcggaagaagtttaccaatgatttctccgccgagtgctttcagcgcaacagctgaaagcacaccctcaggagcgccgcctgatccgaacaggatatcaacgcccgtgtggtcgaaagccgtgttgatggcgcctgcgacatcgccgtcattgatcaatttgattctggcgccggcctcacgaagctcggaaatgattttttcgtgtctttcacggtttaaaattgtggcaacgacgtcctcaacgtccttgtttttcgcttttgccaccgctttaaggttgtcaatgacaggtgcttcgatgtcaatgcagcccaccgcttccggaccgactgcgattttttgcatatacatgtcaggagcattcagcagagtgccgtggtctgcgaccgcgatcaccgtcagcgcgttccagccgccgcttgctaagatgtttgtgccttcaagagggtcaactgcgacatccacgcgagggccgtacccgtttccgagtttttccccgatatacagcatcggcgcttcgtccatttccccttcaccgattacaacggtccctttcatcggcactgtatcaaaaacgtctctcattgcacttgttgccgcttcatcagcctcatcttttttcccccggcccatccatcttgctgatgccaatgccgcagcttcggtcacacgtaccaattccattgataaacttctttccatttcaacacgatctcctctcacaagaaaccattatgaattttgaagctgttctatttcttcgtcagtcattctttcccgccaaattgtcgctccaagcccctcaagcttcttctcaaggctgctgtatccgcggtcaatatgctccagtcccgtaatttccgtgacgccatcagccatcagtccggctaccaccaagcaggctccggcacgcagatcactcgccttcacttttgcgccttgaagctcaacaggacctgtgatgatggcagatctgccttctactttcatattggcacccattcgtctcagctcatcaatgtgcttgaatcttgccgagtagatggtgtctgtgacgacactcgtccctttcgcccttgtcaggagcgccgtcatcggctgctgtaaatcagtcggaaaccccgggtatacgagggttttgacgtcaaccggctttaagttcttctgcccgccgacaatgaggagctggtcgtcgcttgtttcgatatgatagcccatttctctcaactttgccgttaacgactctagatgagtgggaatgacgttatcgataatgacttccttgcccattgcagcccctgcaatcataaatgtcccggcttcaattctgtccggaatgatcgtatgcttgcagccgtgcagttccttcacgccgtcgattcgaatcacattggtgcccgcacctttgattttggcgcccatgctggtaagcaatgtcgcgacgtcaatgatctcaggctccttggcagcgttttcgatgatcgttttcccttctgccaaaacagcggcgagcataatgttaatcgttgccccaacgcttacgacatctaaataaatccgtgcgcctctcagcctttcagctcgcaaataaatggcgccttgttcattggttacttcagctccgagtgcttcaaagcctttgatatgctgatcaatcggacggggccctaagtgacagccgccaggcaatccaatgaccgcctgcttgaagcggccgagcatcgcccccattaaataatatgacgcgcgaagcttttttactttcccgttaggaagcggcatgctgatcatcgacgtagggtcaacaaccatttccccattctcaaaatgcacgtggccgccgatttcctttaacaggtcacgcagcgtttcaatatctgaaatctctggaagcccttcaattgtcacctcggaatttgccaaaatggttgcaggtattaacgcaacagcgctgtttttagcgccgctgatatgtactgtaccgtttaacgagtcaccgccggcaatattcaacttttccatgatagtctccttccataagaagatagctgcggagctaaataaaatgtcattttattctgtctctgcaaataaagctcatgtccaaaatctagccaattcgaagagaaagaatacaacacattgtaaaatatcaggaagaaaatagcgaagctttggggggtacaggtttcaaaagatgcacagagacccgccggctcgagagacatcgtcgtcatccggcaaaagcagtacgcatacccttcattccgatatcagcttctgcagcccaatgattccttctctgtaaagcggcgtcagcatctgaagatccgctgtatcaggtcggtgaaatacaaaggccgcggcaaacaggcataaagctgtttgccgcccctttcattatttgttccagtctgccaggaattgttcgattcctttgtctgttaacgggtgtttagtgagcgcatgaatgactttcagcggcattgtgccgatatgagcccctctaagagcagcttctgtcacgtgctgcggatggcggattgacgctgcaatgatttgcgtgtcaaggccgtgaatgtcaaaaatctgtttaacttctgaaatcaggtcaagcccgttgtggccgatgtcatctaaacgtcccaggaatggagatacatatgttgcccccgctctggcagcaagaagcgcctggttggcattgaagatcaatgtaacgtttgttttgatgcctaagtcagtaagtgctcttaccgcttttaaaccgtcagacgtcatcgggattttcaccgtaatgttcggagcgatcttcgccagttcttttccttcctcgatcatttcctcagctttcaaagaaataacctctgcgcttacagaccctttcacgacgtctgtgatctcgcgaagacggtcgtggaatgatacgttagcttcctttgctactaaactaggattcgtcgttacaccggcgagaattcctaattcattcgcttctctaatttcatcgatattggctgtatcaacaaagaataacattttcaaaaagcctccctgattaagaaattttctgaactgtgaatatgattgcgctttctaaagatagacggaaaaccgcctgtcaagctgtcaggcggctataaaaagttccaattgaattaagcttggtttgaagaaccaaattcacgcattttaccgataactgtttctttgatcgcttcacgagctggtccaaggtatttacgtggatcgtactcgtcaggcttagctgccaatgtttcgcgaacagcttttgcagaagaaatttggttttcagtattcacgttgattttagctgtaccaagtgaaattgattttttgatgtcagcagtcggaattccagtaccgccgtgaagaactagcggaagaccagttgattttccgatctcttccatttctttgaagccaaggtttggctcacctttgtaagggccgtgaacagaacctaatgcaggtgcaaggcagtcgatgccagtgcgctcaacaagctcttggcactctttaggatcagcgtagattacgccttcagcgataacgtcatcttcttgtccgcctactgttccaagctcagcttctacagatactccgtggaaatgagcaagctcaacaactttagcagttgttgctacgttttcttcaaatggatggtgagaagcgtcgatcattacagatgtgaaacctgcatgaatcgctttcgcacaagattcaaagcttgaaccatggtctaagtgaatcgcaacaggaactgtcactttgtactcttccataagtgcttttaccatagcaacgactgttttgaagccgcccatgtagcgtcccgcaccttcggaaacaccaaggatcactggagatttttcttcttcagctgcttgtaaaatcgcttgagtaaactcaaggttgtttaagttaaattgtcctacagcgtaccctttttctttagctgtattcaacatttccgtcatagaaactaaaggcatgtcgaatgtcctccttatgtagcctgattgtcttctagcgaaaaaagctttccaccctagcatgacccatatattgctgtcatatgtaaatactcagatcgctttttctccataactaggataccaacttttcgacaaatcggcaacataatgacatgattcatttgtttcttctttttgtcagttagacttcaggggcagatattttttgacggcgtctctgatttcgtcgatgtcaaacggcttggcgaagtgcgtcagagcgcccaattccttcgattcctggatcatgtcgagctctccgtatgccgtcatgataatgacccggatgttttcgtcaatgaccttcatccgttttaagatttcgattccgtccatgccgggaattttcatgtccaaaagcacaaggtcgggccgttcttttgtcacaatgtcaagcgcctgcaggccgttcgcagcctgaaacgtctggtagccttctttattgaacacttcatttagcaaaatacgaatgccgtattgatcatcaacgattaaaattttttcattcatcattttacaccccaatattatgattttcgtcaaaagtaagcagtattgtatgtattctgtttgattttcctatttcctttaattataatagtctactttacgacattttctgagcattttctcttttgttgtatactgatattgtacgttataaaggaggattcacttatgttgaaaatattcacgacgcagttaacaggtattttttcccgcattcaggataaggaatctgacgcgattgaagatggggcgcggctgcttgctcaagcggtgatcagcgggcattccatttatttatacggagcaaatgagctgcagggcgtcttttttgaggccactgaaagcaaagaacccttcccatctgtcaaagcctttccagaaagcgctgaggaagtgacagaaagcgacagggtgctgatgttttgctcagggacgggcacagccgaagaacaggcgctctcaaaagagctttatgaaaaaggtgcgggagtcgtatgcgtatcgcccgcagccaaagacagtgcgggaatagaacagtattgtgatgtgcatattgattctaaactaaaaatgccgcttgttccggatgaagacggcacccgttacgggtttccctctttaatgacagcactgtatgtctatcacgctttatcgtttacactaaaagaaattctgcaagagtatgcataatatcttattgtacatgctggaacttgccggaaacaaataaaaaagacttgcccgcttttgacaaacggcaagtcttttttattacttctgatttgcagcttcgacagacgctccgataaagcctttgaatagaggctgaggtcttgtcggtcttgacttgaactctgggtggaactgagaagccacgaaccaagggtggtctttcagctcgatgatttcaacaaggcgtccatcagggcttgtgcctgagaatacaaagccttgctcttccatttgctgtctgaattcattgttaaactcatagcggtggcggtggcgctcgtacaccacttcatcctgatacacttcaaaggctttcgtgccttcttcaagcttacaagggtaaaggccgagacgaagcgttcccccgagatcctccacatccttttgttcaggaagaagatcaatgatcgggtattgagttgacggatcaatttccgctgagtgggcgccttttaagcccaatacgtttcgtgcgtattcaatagacgccacctgcatgcccaagcaaatgcccaagaacggaatgttgttttcgcgcgcgtattttgtcgcgacgattttaccttcaacaccgcggtctccgaatccgcccggcacaatgatgccgtctgttccgcttgtgagttctgcgatattgttttctgtcacttcttccgcgttgatccatttcacttttacatctgcgtcaaacgcatagcccgcatggcggagagactcgacaacagaaatgtatgcgtcaggaagctcaacgtatttgccgacaaggccgattgtaatcgtttgagacaggttgctgactttgttaacaagctctttccattcggacatttccgcttctttgcatgccaatttcatgtgctcgcaaacaagcttatcaagcccttgtttttgaagctccagcggaatggagtaaaggttgtccgcatcttcacattcaataaccgcttttgtatcgatgtcgcagaatagcgcgattttatctttcatatcttgagaaatcggcatttctgtacgaacgacgatgatgtttggctgaatgcccaagctgcgcaattcttttacgctgtgctgtgtcggttttgtttttaattcgccagcagctttaatgtaaggtacgagcgtacagtggatgtacattacgttttcacggccgatgtcgctcttcatttggcggatcgcttcaaggaatggcagtgattcgatgtctccgacagtaccgccgatttctgtaatgacaacatctgcgtttgtctctttccctgcgcggtaaacacggtctttcaattcgtttgtgatgtgcggaatgacctgtacggttccgccaaggtaatctccgcggcgttcttttttaagaactgttgaatagattttacctgttgtcacgttgctgaatttattcaggttaatgtcgataaaacgctcatagtgaccaaggtccaagtctgtttcagcgccgtcatccgttacgaatacttcaccgtgctggtacgggctcattgttcccgggtcaacgttgatgtatggatcgaatttttgaatcgtcacgttcagtccgcggtttttcagcaaacgccctaatgaagctgctacaataccctttccaagtgaggatacaactcccccggttacaaaaatatatttcgtcatttcgtttgctcctctcttcgctcttagctacatttttaaaatgtactattttataaaaaatcatttagccttttaaatgatttataagaaaaatgaggggtgaaaataagaaagctccctttcaatttcttgaaagggagcataacgtactatgttctctcttcgtttttgaagagcccaaaatacatactacctagttcgactatgaaagtcaagatcgttttgaagatgaaatctgatactatttaatttcctcttcttcatcatcatagtcttcatcatcttcatcaataatatcttcttcgatctcaagatcatcgtcgtcttcatcaagatcttcttcgtcaaaatcgtcggcttcaagatcgagttcttcctcaacttcatccaaatcaaggtcgtcttcgtcgatctcttcaaactcgtcaagatcaagatcttcttcgactgctttcttcgcttttttctttttcgccttgactgtcggctgagtttcttcatcaagctgatcatacggataccagctgcgaagcccccacgtctggtcagaaagcgccaggaagcggccgtcaatgtttaaatctgtataaaattgagcaatgcggtctccaagctcttcttttttcacgccgagcaaagatgcgatttcatttaaaagctcctgaaaaggaactggttttttatgttcttcaaataattcgtgagcgatttcaactaaagccatttcctttagctcttcctgtgaatattgtttgatacccaaggtcggacactccctttctattacttatatgtatctgttttatcaataatgaaagcgattttgtatcgttcttatacaaaccatacctctcattataaacaaaataaaacagaatatgctacccttaacagcgttaatttaaataattttacaagagtgatccgactgagagatgttttccgttaatccgcgagcattctggagatgaccagtctttgaatttcttgagtgccttcatagatttgcgtgatttttgcatcacgcatatagcgttctaccggataatcttttgtatagccgtagccgccgaaaatctgcactgcttcggtcgttaccttcatcgccgtatctccagccatcagtttggacatggcggaagcttttccatatgggaggcccgatgattctaaccacgcagcctgataggtcaatagccttgaagcttctatcattgtcgccatatccgcgagtttaaaagcgacgccctgctgctcggcgatcgattttccgaattgctttcgctcttttgcatattgaagcgccgcatcaagcgctccttgggcgatgcctacggcttgtgcagctatgccgtttctgcctccgtcaagcgtcttcatcgcgattttgaagccttctccttcttctccgagacgctttgatgcgggcactacacaatcttcgaacatgatttccgttgtcggtgaagaacggatgcccagcttcttttctttcttgcctgtaaaaaatccttcaaaatccttttctactataaaagcggtaatgccttttttctttttctcgggatcggtgacggcaaaaacaatgtaaatatcagcaacgccgccgtttgtgataaacactttggaaccatttaacacatagtcatcgccgattcgttcagcagttgttttcatgctgccggcgtcagagccagaccctgcttcggtcaaagcgaatgcgccgattttctctccgagggccagctgtgttaagtactctgtcttctgttcctctgtcccaaaggcaaacagcggccagctgcaaagagagatatgggcggaaagcgtcacaccggtggaggcgcacacttttgacagctcctccaccgcgataacgtaggccaaatagtcacttccgattccgccgtaatcttcaggccacggaattcccgtcagccccagatttgccatttcccgaaacaactcgcgatcgaagcgttcttgttcgtcccgttctgccgctgtcggggccacctcatgcttcgcaaaatcgcgcaccaattttcgtatcatctggtgttcttctgataatgaaaaattcattgcttctcccccattttcagatcagcgcctaaaacggattgagccagaagctcgacgacatcgtacgttttgacttggtcttcggcttccttcgcctttgtgccgtccccaagcatcgtgagacaatacggacagccagaactgatcaccgatgggttgactgcgagcgcttgctctgtcctggcgacgttaatcctgttgcctgtttcttcctccatccacattaatcccccgccggctccgcagcacatgccggtttcccggtttctctccatttcaacaagctgcacgcccggaatggctttcaaaatctctctcggcggatcatagacttcattgtaccggcccaaatagcacgaatcatggaaggtaatcgtctcatgaagcgggtgctgcggtcttaattttccgtttttcacaagctcggccagcacttctgtatgatgataaacctcgccttcaaatccgaaatccggatattcgtttttaaataaattgtatgcatggggatcgatcgtaacgatttttttgacatcatttttttcaaattcagaaatattcttctcagccagctcttggaacaaaaattcatttccgaggcggcgcggcgtgtctcctgaatttttttctttattgccgaggatcgcgaaggacacgcccgcgtgattgagcagcttggcaaaggaaattgcgattttctggcttctgttgtcgtaagaccccatggagcctacccagaaaaggtactcaaattcttttccttcttttttcatttcttttacagtcggaatctcagcatccggcgcctcgtcacgccaattttcacgttccttgcggttgagtccccacggattcccttgccgctcaatacttgtcattgcgcgctgggcgtcactgtccatttttccttctgtcagtacgaggtagcggcggaggtcgatgattttatccacgtgctcattcatgaccgggcattgatcctcacagtttcggcaagtggtgcatgcccaaatttcttcctctgtgatgacgtcgccgatcaagcttggattgtaatcaagcgccgctgcggcttcctgcgatccgctgcccgctgacgaagcagccagctgattgcctctcgtatgccgaaacgctgctgcgggcacccatggggagcgcgaggtgacggcagcgcctttttccgtgagatggtctctgagacgcaaaatcaagtccatcggagaaagcatttttccggtgcctgttgcaggacacatatttgtacagcggccgcactcgacacacgcgtacagatcaagcagctgagaccgtctgaaatcctcaatttttcccgctccgtagctttctttcgtttcgtcggtaaaatcaattttttcaagttttccggcagattccattcgattgaaaaagacgtttgccgggccggcgattaaatgggcatgcttcgactgaggcacgtacactaaaaagctaagcaagaacagaagatggatccaccatgcgatatagaaaatcaccgccgcgcctgttttcccgacaccgctaagcataaacgcaatacctgaggcaattggctcgctccaagaaagcccatgctcatgccaaatcagattcatcccgttcccaagcagaacggtcagcattaatcctccgataaaaatgagaacgagtccggctttgaaaccgcgtttcagcctcacgagcttttcgatataacgtctgtagaatgcccacccaacagcaattaaaatgagaaacgtaacaatttcctgaaaaaaggtgaaggcgggatagaccgggccaagcggcagattccggccgggagccagtcctttgatgataaagtcaattgctccgaactgaaccaatataaatccgtagaaaaacatgacgtgaatgattccgcttttcttgtccttgagcagttttttctgtccgaatacattcacccatatggcgtgaagcctttccttgaaccgttgatcaaattgttctttctggccgagcttgatgtaggccagtctcgttttgaccaagtacacaaacaaatagacaacgtaagcggttacaatcagaaataataatgcatttgcgatgagaaagccgctcattccaattccccctttttactgataaagaccgcgatcccctacccccgaatctgtataagattatctttatgataaataatgaatgagtgttcagtcaataattaaattcctgctgttcgggcacactacctttactacggaaaggagtgccggtatgaaggtatttatcgtgattatgatcattgtcgttattttctttgccttgattctgcttgatatcttcatgggccgtgccggatacagaaaaaaggcgtacgagcctgttttttcaaaaaagaagagtgacatcgaattgatccactgcggcgctgatctcgttgagcggatgatgaatgatattcgccaggccgcctcttctgttcacatgatgttttttattatgaaaaatgatgaggtcagccacaatatgtataccttgctgaaaacaaaagcccaagctggcgtatccgtttatttgcttctggattgggcgggctgccgggcaattaaaaaaacggcgctgcagacgatgaaaaatgccggcgtccatgtccatgtgatgaatcgtccccgttttccttttttcttttttcacatgcaaaaacggaatcaccggaagattacggtgatagacggaaaaatcggttatatcggcgggtttaatatcgccgaagaatatcttggaaagaaagcgaagttcggcaattgggaggattatcatctgcgcatgatcggagaaggcgtacatgatcttcaaacgctttttgcttctgatctaaaacgaaataccggaatcgaactgggttcggatgtttggccaaagcttcagcaagggactatttctcacaagatatatgcgaccgacggttattcccttgaaaacatatacttggccaacattgcccaagcgaagaatcgccttacggtttgcacgccttattacattccatcaaaaccgcttcaagaggcccttattaacgcaagaaaaaacggcgtatccgtgagaatcattgtaccgatgaaatcagaccatccgctggtacgagaagcagcttttacgtattattcggagctcttggatgccggctgccttatttatcgttattatcaagggttttatcatgtaaaagccctcatcatagacgaccatctcagcattatcggaacagccaacttcgataaacgaagcctgttcttaaatgaagaggtgaatgttgaaattgatgacgaagcgtttacaagtgaagtctatgccacaattgaggaggatatgaaaaagtcggagctgctgacgatggaggatttcagcaagcgcacattcaggcagcgcccggcggaatggctcggcagggcattatcttatttcttataaaggagagttcctatgattttcagattcgggttcgtttcaaatgcgatgagcctttgggatgcgtctcccgctaaaacattgacattcgcgcgttattcaaagctttcaaagactgaaagaaaagaagcgcttctgactgtgacaaaagccaatttgcgcaatacgatgagaacccttcactatatcatcggccacggcattcctttgtaccgtttttccagttcgattgtgccgctggctacgcatcccgacgtgatgtgggattttgtaacaccgtttcaaaaagagtttcgggagattggagagcttgttaaaacccatcaactgcgaacaagctttcatccaaatcaattcactctgtttacgagcccgaaggaatccgtcacaaaaaatgcggtaaccgatatggcgtatcactaccgcatgcttgaggccatgggcattgctgatcgctccgttatcaacattcatattggcggcgcttacggaaataaagacaccgccactgcacaatttcatcaaaatataaaacggctgccgcaggagatcaaagagcggatgacacttgaaaatgatgataaaacatatacaacggaagaaacgcttcaggtctgtgagcaggaggatgttccgtttgtctttgactttcatcatttttacgccaatccagacgatcacgccgacctgaatgaagcactgccccgcatgatcaaaacgtgggagcggatcggccttcagccaaaggttcacttgtcttccccaaaatcggagcaagcgatacgcagccacgccgattatgttgacgccaactttttgctgccactgttggaacgctttaggcaatggggaactaatattgatttcatgattgaagcaaagcagaaagacaaggcgcttctccgcttgatggatgaattaagctccatccgcggtgtcaaacgcatcgggggcggtgcgctgcaatggaagtcataaatgtgcaaaaataggtttacgacttgtcagctttgggaacttaggctatataagacaacaatcgatggaggagaaagatcatgaaaaatatcaagtctctgaaagtagccgcacaggcctttactttaagaaatttgattcatctttataaaatgtgccattccggaagccacgaggtttatatttattcaaagaaaacgatgtgcaaaatcaaaagcttaattgagcttgaaacgttccgcatggctcataatgaaaaggaatatctgatcgtagttgaaggaacaaaagcatcacagctcattgaaaaattccaaaatctcatcgagcctgctgagagagaagcgctctaacttacatacaaaaaaggatagacatctgtctatcctttttcttatgctcttacataatggagctgaaccgcttgtccaaattgttttgtcccttttaaccgcagttttgtttcatttgttagttcgtgaaacagcgggatgccgcttcctaaaacgacgggaataacagtgatgatgaattcgtcgatggcatcttctttcataaagtcattcacaagctctgccccgccagctatccagatgtttgagcctttttcctgtttcaaacgggcagtgaaggctctggctccctcattgataaacgtcacatgttcatcttgataactgtcgggcgatcctgtaaaaacatagcaggttttatcctgatacgggaaaaccggtgttagcactttaacgtgctcatatgtgctccgccctaaaatgactgtatcaacagtctgataaaaatcactgtagccgttgtcaccttcaccttcaaattcatccagccaatcgatgcttccatcttcttttgcgatcatcccgtccaatgaaacagcaatgtacagcacagtttttctttccatgttctcctcctatcgatgcaccatttgcccgaattgcgcttgatgcagcctgctgtataggcctccggcttcgatcaggtcttgatgacggccttgttcttcaataccgttgtttgtgacgactacaattctgtccgcgtctttgattgttgccagcctgtgggcgatgacaagcgtcgtgcgcccctcagacaactcttgaagcgccttttggatcgccgcttccgtctctgtatcaagggctgaggtggcttcgtcgagaatcaagatcgacggatttttcaagaacatccttgcaattgacagacgctgtttttgcccgccggaaagcttcacgccgcgttcgccaatcatagtatccaacccatcgggcatgttatggacgagctcttccagatgcgcctgcttcacagcttgccaaatgtcttcttctgatgcgcctagtcggccgtaggcgatattttctctaagcgtgcccgagaataagaaaacgtcctgctgcacgacgccaatctgcccgcgcaacgaagaaagcgtcatgtcttttatactgatgccgtcaatcgtaatgtcgccctccgatgcttcataaaaacgcggaagcagactgcaaagcgttgatttcccagcacctgacggaccgacgaacgccaccgtttcccccgcttgaatggataggttgatgtcattgaggacattgtgatggtcatcatagccaaacgaaacatgtttatagcggatattgcccttcaggccggaaacatctctcgcatcaggtgaatcctgaatgtccggctctgtctccatgagctccatatagcttttgaaacccgcgatccccctcggatacatttcgataatggcattaattttgtcaataggcctgaacagcacatttgtcaggagcacaaacgccacaaattccccgtacgataaggagccgcgaatgacaaaccacgtcccgcacaaaaggacaaacagcgtgacaaaccgggtcagcatatagctgattgacccgtttttcgccatgattttgtaggaagaaagctttgtgacacgaaaacgctggttgttgacggcgaagcgttctttttcaaacgcttcatttccgaacgcctgcacaagccggatgccgccgatgttattttctacacgcgcgctgaagtctccgatatccttgttcagcgtggtaaatgctttggtcatttttttgttgaaataaagcgctagccaaatgacgatcggcataatgataaacgttaataaagcaagctgccagttaataaacagcatcactccgaacgccccgagaatggtcatgaccgcaatgaataagtcttccggaccgtgatgggcgacttcaccgatatacattaaatcgttcgtaagcttcgacatcagcgttcccgtcttgttgttgtcgtaaaatttgaacgagagcttttgcaaatggtcaaaaagcgactttctcatatcagtctcaatattgataccaagcatgtgtccccagtaggtcacgatatactgaagagccgagctgagcgcgtacaccgcaaataacccgattgaggtcgcgatgatcagcccccagtccctgcccggcagcaaggtatcaataaaataattgacaatcaaaggaaaactcagctccattaaacctcccgcgatcgctgagaaaaagtcgagaaagaacaacgttttatatggtttataatatgaaaaaaattgccgcagcaccctatcttcccccaatgtataaataactgataatatttctcaattatactatacacgggctgttttgaaagatcagatttcttttttcttacagaacacctgaaaacaggcgggcaaatgactcttttgtccggtcagccacgcctcttttataaaagccgacagggctgagcttttcactttcctgcatatcctcttcaaaatggacctcaagggttcggatcgcttcggcatccgtgaagaacacattcacttcaaagttgagctgaaagctgcgcatatccatattcgcggtgccgacggaggcgagatcgccatcaatgatcatgactttttgatgcatgaagcctttttggtaggagtacacttcaatgccctcaaggagcagctccgggaaataggacctcgacgcgtattgggtcaaaaagctgtcgttcttctccggcaccataacccttacctctaccccctttgtcgccgctgcttttagcgccgtgcgaatggattcattggggacaaaatagggcgtggcgatccatattgatttctgcgctgaagaaatcatttcataataaaggtcgctcatgctttctttcatgtcagggcctgtcgcgacaatttgataaatgcctcctccttccacgggaaccggggtattgtactcctcttgatcaattagcacttcattggagacgtattcccaatccagcataaagatagcgtggagcgtttgcacaatttccccctcaagccgcaggtgtgtatctctccaaaatccgatgtgcggatctctgctgatatattccttcccaacatttaatccgcccacaaaaccggttttcccatcgatgatcacgattttccggtgatttctgaaattcagcttctggttgaaaaacccgtatttcagcggagaaaacgggacgatgtccacccccgcttgtttcattctcataatatctcttcttgccagcttcatgcttcctgccgcatcgtataaaaacctcacctcgacaccctggcgcgctttctccatcataatatccatcatgccgcgtccgagcatgtcagatttaaacatatagtattcaatatgtatgtaagattccgcttttctcattgctttgaaaatgtccgggaaggtttcttcgccgtttttcagcactttgatgttgcttttcgtattgatattcatatgggcagccctgatggaatatgtaaagaacctctcttgattgtccttcagccctgtcacttcgggcgtttccttcttgtcaaacagcttcctgagcttttccctgttgtacattcgttttgtcttaaacagctttccctttacataaagctgtcccgaaaacagataaaacacgtagccgacgattggaaaaaagacaagaatatggatccatagcagcgtgtgctgcgaggtgcggttttcaagaattaatgaatagatgctgaacaaaataatgcttatatagcaaagcaatcctccgtaaaactcaagcctggaaaccggaaaaaaccaaatgacatatgccccgatgagcatcatatataaaaagaaaaattccagtctccttttcagcatcctgattctctccaatctgattcaattacctctgtattacctcttttttctaatcgataaaccttgtaagtaaataacctctccgccgaaggaggagaggtttagaaaaactaactgtcacggaattcatccgcatcgtttctgcagaaataaagcaagactattggcaacgccgagtgaagtctgatgatacaacatgagcggcaggccgaacccgctcagcactccggcaagcgccgaaaaagaggcggcgctgtgactgcaaatacggtggatagagtgaatttgatgcccactctgatgagagaaaatatataaaacgggatattgatcagaaagatataaggagttagtcaggctgagtcataatctgctgttccgccggtttaaaatgagtaaaatccgttttattcttgatcttatttccaaatacaaacacaacaggattcccggccgcccagccattacctttgcagaaaaaaccccctcctgggggggattttcatgagcgtttccgatatacaacgtagctgcgggtcagatacttgagcggcagactgaacacatgaaccaatcttgtaaacggccacaggataaaaacgacgtatcctatcacaatatgaaacttaaaccatagcgggacactctccatcaaagaggcgtcaggccggaacaaaacgatttccctgaaccagggcccgactgtggtccggtaatcaaatcctttcgaatcaatgttgagaaacgtggccgcaacgcccgacagcatcatgaacagcagcaggagcagcgtaaggatatcggatggcgagctcgttttgcggattcttttgtcaaacagccttctgtacgtcaggatgacaagtccggtacatgccgcaatgcccgccggcaagccagcgccaatcgccattttgtgatacatatgctctgaaatgccaagggaagcatacacgccttccgggatcagaatccccatgacatgcccgccgacaacgcacagcagtccccagtgaaaaagtgtgctgcccgccgcaagttttttcttttctaacatctcgcttgatttcgccgtccagccaaattggtcatgctggtagcggtaaatatggccgccgataaagattgtcaatacaatgtatggcataataccccagaggatctgcccgctcatgcctgaacagccccttcaacgctttcacgtacgccaatgttttcaagcgcggccagcagcacgtgcagcagttcagcgtatatactgtcatttttttcgagacgggatgccagctccctcacattggacagatatttctcaaacacgcttctcgctgcttcaatttctgcagccgcagcaaattccagcatcagcggcagataatcaggcagctctttctctgtcggcaggaaaccggattgctcgtatgtgttttttaaatgcagcaattcaacgccgcgttccctttgctcgcccgagttaaagtaggtgacatacatatttgtttttttcccaaagtcgaacgtatagacatagtgttcaatcagcgcttccggtgaaaagctggctgacgcctcgaaaaagtgcagcagcttctcccggatttgccggttgctgatttcatggataagagccttccaatcgggaatctcggctctccactcttcatccggataagagagaagagaggaaagagcggagaacgtcatttgccggtctgtggtgttcatcttgttacacctcatttatcaaaagttagaaacaggagccggggccgcctgaaaatgataagccgcagctcccttgttcagcatataaatctgaaacttcttctcgatgactgctcggtatcacaaagcggtcatcatatttggcaatcgcaagcagccgatacatatcttcaatttgctgttctgttaagccgacactggagatcagttccggatcgattgatttattcgtctggatcgctctcatatactggcgcatgacagacattttctttaacgttgaccgaatatgatccgtatcaccggctgttaacagctgcgccaaatagtctatcgggattctcatttggtcgatagccggaaaaatatcttccgcggattgccggctgccttttccttcaaagagattcataatcgggctgagcggcggaatgtaccacaccatgggcagcgtgcggtactctggatgaagcggcagcgcaatcttccagtcaatgatcattttatagatcggcgattgctgcgcagcctctatccattcagccggaatgccttgttcttttgccagcttggcaacctcaggatcatttggatcaagaaaaacgtccaattgggaatggtagagatccttttcattttcaacagatgccgcttcctccactttgtccgcgtcatacagcatgacgccgaggtagcggattctgccaacacacgtctcagagcagatggttggcagtcccgcctccaaacgcggaaagcagagtgtgcatttttccgctttgttcgtttgccagttaaaatagacttttttataaggacaggatgagacgcaatatctccatgaacggcatgcgttttgatccacaagcacaatgccgtcctcctcgcgtttgtacatggcgccggatggacaggatgagacgcacgccgggttgatgcagtgctcgcaaatacggggcaaatacatcataaagacctcatcgaattctgttttgatcgattcctccatcttttgtacgttgggatcttcaagtcccgttatgtggccgcccgcgagatcatcctcccagttcggtccccattcgatattcataaaatcccccgttaaggacgatttcgggcgtgctaccggctggtgttttttctgcgggctgttcgttaatgtttcataatcatagttccagggctcatagtaatcatcaatcgacggctgattcggattatagaaaaggcctgcaagccgattggttttcgagcccgatttcagctcgagctttccttttttcaatgtccagccgcctttatatttgtcctggtcctcccattgcttcgggtagccgatgcccggctttgtttctacattattgaagtacatatattccgcaccggaacggtttgtccacgtgtttttgcaggtgacgctgcacgtgtggcagccgatgcatttatccaagttcatgaccataccgatttgcgctttaatcttcaagccaatcgacctccttcagcttgcggatgacgacgttcaggtcgcgctgattccccgttggaccgtaataattaaagccgtagctgagctgggcgtagccaccgatcatctgtgtcggcttgacgtgaatccttgtcgggctgttatgggtgcctccgcggttattcgtcagctttgtgccgggcacgttgatgtggcggtcctgggcatggtgcataaacgccattcctttaggaatccgatgagacaaaacggctctcgcgacaacaacaccgtttcggttaaagcattcaatccaatcgttgtctttgatatccgtgtcctctgcatcatctttattcatccacacggttggcccaccgcggaacagcgtcagcattggcagagaatcaaaatacatgctgtggacagaccatttattatgcggcgtcaaataattgaggacgatttcttttccctcttgatcaggccgcttgctcagaaacgggcgatgctggaggatcggtttgaatgtcgccatcgtttcaccgaattccatcatcagttcatgatcgacataataggattgtctgcctgtcagcgtccgccacgggattaatttttcaacattcgtcgtaaacggcgaatacctgcgccctcctttttcagagccggaaaacgctggagacgtgatcaccgttttcggctgggctgtaatttgttcgaacgtaaagcactcttcctcgcgttcttccgccaggtctttcagcttcaggttcgtgatgttttcaagtgattcccatgctttgacggcgacctttccattcgaagtggatgatagggttaaaaccgcttctgccgcctgctttgcttcacttatatttggacatccctttgccacgctgtctgaggtgatttctcccagtctctttttgagtgattcatattcatcggctattgaccagctcatcccttttgttccgctcggctttaaagcagcgttaggaccgagtgcggtcattttatgaaaaatgtgtttgtaatcccgttcaacgacttggatgttcggcatcgtttttcccggaatggcttcacattcgcccttgctccagtcattgattttgccgaatggctgggccaattcctgcatggtgtcgtggaggagcggcgtcgcaaccacttctttcaccggctccatattgacttcttctgccagatcggaaacggcttttgacagcgccttgaaaatatcccagtctgacttcgattcccacggagctgagatcgccggagcaaatggatgaatgaacggatgcatatctgtgctgctgagatcgtgtttttcataccatgtcgccgccggcagcacgatatcggaatacagcgccgtacccgccattcgaaaatcaagattgattaataagtcgagctttccttccggcgcctgctcccgccatttgatttcttctgggcggatgctgtcgctgtcgtcattcattaaaccgttcgttgtccccagcaaatgcttgagaaaatattcatgcccttttcctgagcttgagatcagatttgcccgccatacaaagagattccttgggaaattcacttcattgtcaggatcttcaatcgcgaatttcagttttttctcttggagctgtgaggccacgtacgcacctacgtcttcaggtgttgctgcccctgctttttcagcttctttatacagatcgatgccattttgattgaaagtcgggtaagacggaagccaccctagccgcgccgccagcacattgtaatcagcgtggtgcttgtagcgggatgacgcagcaatcggtgatgccaaatcactgatcggctggtcctcataacgccactgatctgtcgcaaagtagaaaaatgaagtgccgttttgcagcttgggcacgccctcccagtcctttgcagttgcaatcgtctgccatccttcagcaggtcggagcttttcctgcccgacgtaatgggcccagcctccgccatttacgccttgggcgcctacaagcaaaacaagatttaacactgctcggtagatcgtgtcggagttgaaccagtggttaatgccggctcctacgataatcatagaccggccgtctgtatcgatcgcattttgagcaaactctctggcaatcttaacgacagcttcttttttgattcctgtcatttgttcctgccaggcaggcgtaaacggctcaggatcatcataggagacagcttgttgttcgccgatgccccgatttacgccgtagttagccagtatcaagtcaaacacggtcgtgacgtacgtctcttcaccgttcaggttcatttttttaataggaagatcccgctcgagcactttgtttccgtcatttgaaaaatacgggatgcgcaccgtgccgatttcatcctctattccgagcacagagagacggggttcaatcggttccccggtttcttcatcaatcatgtgcaggttccatttctgctgcccgtcccagcgcgagcccattgtcccttggggtatggcaaatgaacttgtctgttcatcccaaaccgcaggcttccactgatcatgctttgtcttccgcccgatgtccttcgcatgcagaaaccgtcccgctgtgtatacgccattttcttttgacagagtgacgagaaatggaaaatcagtgtattgcttcgcgtactcaataaaacgttcagtttcttggttcacgtaaaattcctgcagaataacgtgacccatcgccatcgcaagcgccccgtcagtcccttggcgaatactcagccagtcatccgcgaactttgaggattccgcaaaatctggactgatcgaaatgaccttagcgcctttatagcgggcctccgccaaaaaatgcgcgtcaggcgttctcgttaacggaacgttggagccccatgtgataatatagccggaattgtaccaatcactgctttccggaacgtccgtctggtcaccccaaatttgcggggatgctggaggaagatccgcataccagtcataaaaactgagcatagggcctccgattaacgacataaaccgggagcctgatgcgtggctgatcatggacatggccggaatcggagaaaaaccgacgtttcggtcaggcccgtatttcatcactgtatacagcagagaggctgaaatcagcttcagcacctccggccattcagcgcgcacaaaaccgcctttccctctcgcctgtttataggacttcgctttttcagggttttcgacgatcgatttccaggcttccaatggattttgatgcgtctgcaatgcctcccgccacaaattgatcagcacaccgcgcacgtatggatatttcacacggagcgggctgtagatataccatgaaaaactggcccccgcgggcagcctctcggttcaaaatcaggcatatccgggcctgttgatggataattcaaattttgcccttcccacgtgacaattccgtttttcacataaatattccagctgcaagaccctgtacagttgacgccgtgggtggagcgaacgactttgtcgtactgccatctgtttctgtatacattctcccaatcgcgatcctcgcgggtagtttggctatgtttatttgaatggtgttcgataggagagaaataattcaatctcctaaacaacggactcattttctttttcttcatgagagttcactccttccgagtcaggtgatgctaagttcactataaacagagacagcgtgttttcttgtgaactatgtcacacactctgcttttttcacaaaatgttcacacaaaggagaaggaaggctgagttcaggcaggacgcttgggtcattagctgcctttcattcaaagatcaaaaaaaaccggctctatttaagaaccgggctcggcgttttcatcctgtgatgtatgcagataccgcaaaaataattgataggaacaaaaaacattttgctgaagcatagccaaaaagttcatttgcagctgcggatgataagacatcattttcttaaatatgtaatatgggatgttgagaatcagaatgtctgaagtggcattgactgagataaagggcgataaataaagcccgcctttttcatcaatcggaaacacatcgcctttttcccacagcgcaacggttttcgacccttcagggagccttgtgtccataaaacggacactgccttttaatacaatataaacagattgagaatgaagaaaagatggagactgatcacatgaaccgcggataaacgtgccgtttttcagcaaggtttcgacaatggatagaggcacttcattaaacataggaagttgtttcagaaataataaatagtcacactgattcataggaaaacctcctgtgctaagctaaggatagctttagtgtagctcgactgagcctgtacagcagtgatgtatttcacagcctgtatgatgaatgtcacttatcaggagggtgaatgcatttataatgaaagaaaaaaggaggatttcgatgaaggcgctgattccgaagcagcacggggcgtgggcgatgctgctgatcccatttttactcggcatggtcaagggaggccccgttatttggcatattccgctcttcctaggctggcttttcctatacttagcggtttatcccgttacgcttgccttaaaaaagaaccaaagcaaaccttatcaaaagtggatgtgttattacggttttcccgcctgctgctttttgatgatctcggtctttcataagccgcctctcatctgggtgggcgtttctttactgccgctgtttctcatacatatgtattttgcccgcagaaaaaaagaacgagccctattgaatgatgttgcaggtgtcttgttcttttgttcgggcgggtttgcgagctgctggctggggatgggaaccctcgacggctgggcttggtttattttcttgcagtctgctttattttttatcgggagttccttttatgtgaaatcggtgattcgtgaaagaaaaaacaggacatttgcatactggtcatggggatatcacctgctgctcccctttttatccgctcttttcggagcaggatgggcgtttctcgcttttatcccgagcagcttgcgggcatggttttttcatggaagggattggcccgtaaaaacgattggcattctggaaatcgtgaatgcctgtttctttcttgccgtcatgtgcctgtttatcacaaggtaaaaaaacaaggacaccgctgtccttgttttttcagtcaatattgcaaatctccagcgggcaattttcacactcaatctcacatcgtaaatagtcccgcttgtgcaaaataatttttccggattcgtctatcgaaataaccccttttttgcggagatctcccagcatacggttgatgctttcccgtgcagccgcacaaaactttgccaaatcctgatttgtcaggacaatgttaatcagaatgccgtcgcttcgctccactccgtagctgtttgataagcggataagggtagaatagagcgccccctttttgccatgaagaagcagatccctgattttggactgaatcttccggaggtgcgtgctcatccatttcatgaactcaaatgtcaaagcgccgttttggattaattctttttccagcttatttttattaatgacgagcacctcgccatcctctagtacttttgcactgagcatataccttggttcttcagtgaaaagtgttaattctccgacgatatcatgcttttggcagattctaagcgtcaggtcttttccgtcagatgtcagcttgccgatttcaatgagtcctgattgaatcagataaagctcttctgcatccattccttcccgaaacaaatacgtgtgtttttccatttttcttttcgtgctgatcgattccagcaattcatacagatcgctggatatatgatcactatcagatggtcgaacagagagaaaattcatgagctcacctcgaagaaagtcacgttgtgtgtttattgtaacgtgaattgatttgtacccatcgagaaaaaactaacaatcttgtgaatgccccagtgttagttgatgctctggctgtttctctccgtgtgtgttttcattctttcctgccaatacatccatatgacaaggacaaaactggctaacgccacctctgaaagcgccataaacccgatcgcgtactggcctgttgcctgaaatacactcgccaatatgagcggaggaaaaaagccgcctaaaccgcccatggcagacacaatcccattggcaatccccgcttgcttcgaaaaatagaaaggaaccagtttaaaaacagtcccatttcctacgcctgagcagacggccacggttaatgatccaaacgtataaaggccgattgtcggcgagaacgataggataatgcctgataatgtaagcccggcaaaaacaaacatcaagatgcggagcgggctcattttatcagccaggaatcctcccgcaggcctgagcagcgtagaaaccgcaataaagccagccgtccgcaagccggcatctgcaggattcagcccaaaatgctccaccagaaagttcggcagatagatagtgaaggcgacaaaggcaccgaacgtaataaaataaaacaggctcagaaaccatagcacatgatttcggtaaacagctttgatttgagtcttaacagaaactttgaccttcttctcatgcctgtcgccaaacaatacgtgcagtaaggcaaagacagacagcaaaatcagatacatttgcacggttgatttccacccgacggcttgagcgataaccggcgctgcaaatgtcgtaacggctgtcccgatatttcctgcaccgtaaatcccattgacgacaccgtgcttttctttcggataatatttcgggagggaggtcaccccaatggaaaacaccgctcccccgatccctaagaaaaagccgcctgcgattaaatcaaacagagaatccgcgatactgatccaaaatacaggaaataaaagcaggatgaaactgaccataaacatgagccgcgcgccaaacctgttcgttaaataccctaaaggaatgcggagaagcgacccgaggatcacaggaatcgccgtcaccaaagaaatctcacccttgcttaaatgaatatctaatgtgatttgggaaatgagtgatgaaatcagcacccaaaccataaaccctgccaccaagcttaatgactgtaacgataattgaatgtgttgacggttgatcatttggcttgcccctttcaatgattcaataatcagtcttatcatacaaaaactcggcaaacaggattgtgaattacatcacacgtttttctcataaaaaaaggacaaagcccgaagactttgtccttttgatcgtgattacattttttccggagccgatacgccgatcagctgaagcgcattgttcagcgtaatttgcgttgccttcattaaagccaggcgcgcgcggctcttctcttcattttcagggtcgatgactttctctgcgttgtagaagctgtgcagagcagaagccagatcataaatatagtttgtgacacggtgcggaattcgtttttccgctgcttccgccactgcctctgggaagccgccgatcgttttcagcagatcgtattctttttctgattgaatatggctgaaatcaagatctgccgccggtttaagtccctgctcttccccttggcgaagcatgctgcaaatacgggcatgcgcgtattgtgcataatacacagggttttcgttagatgttgatacagcaagatctaagtcaaaatccatatgggtgtccgcacttcgcatcgcaaagaagtaacgaacggcatccaagccgacttcttctatcaggtcacgcatcgttacggctttaccggtccgtttgctcattttcattttctcgccgtttttgtaaaggtgaacgagctgaatgatttctacttcaagcgttcctttttcatagcccagcgcttcaattgccgctttcatacgcgggatgtagccgtggtgatcggcgccccaaacgttgatcagcttatcaaagccgcggtcaagcttgtccttatgatacgcgatatcaggaagcaggtacgtgtacgtgccgtccttcttgatcaatacgcggtctttatcatcgccgaacgtcgtggaacggaaccaagtcgcgccgtcttcttcatagacatggcctttttcgcggagcgcttcaagcgccgtgtcgatttttccattttggtacagtgaagtttcggaataccacacatcaaacggcacacggaagttttccaagtccttgcgaagcttgtccagctcgtatttcaggccgtattcacggaaaaacgcgaggcgttcactttcctcttcgttaacgaaacggtcaccgtattcctcagcgagacgctttccgatcgcaatgatatcctcgccgcggtagccatcctccggcatcggtttttccaatccgagcgcttcaaagtaacggacttcaacagaaagcgccagattgttgatttggtttcccgcatcgttaatgtagtattcgcggcttacatcgtaacccgcttttgaaagcacgttgcacaaggaatcgccgacagccgcccctcgcgcatgcccgaggtgaaggtctcccgtcggattcgctgatacgaattctacctgaactcgttcaccgtttccgatgttcgtttccccgtatgcttcccctgcttccagtacagacggaatcagctttgttaaatattgattgttcatatagaaattgataaaacccgggccggcgatatccagtttttcaatcgaagcctttcctttatcaaaatgggcgacaatctcttcagcgatttggcgcggcgctttttttgccactcttgccagctgcatcgccatattcgttgagtagtcgccgtgtgttttatctttcggtgtttctaaaacaacattgggaatctggctttcttcagccagtcccgctttcagaacggccgctttaatttcttctttcagcacgtccttcatttgttccgcaatgttcatgcgtgagttcctccctcatacgtgatcgtcatattatgtaaatgctcctgctcgtctccgacatgcatgtcatatgcgatgctgatacggcctttttcttcatcgagatcagattgaatcgattttgtgcttgttttcagctcaagctcaccaaatgacattttatatttagcaattgtggaagctcccgttacgaaacgctgattcattttgacagcgcctgacctcatgaccaggacttcgccttcgcttactttcacaatcgttttgactttgcctaagtcgtgttcttcataataagatagatacactttattttgttttacatagtaaaatccggtggtgcggaattcgatgacttcttggtttccgtcatcctcgatcacagacttcacatggagtgttatcggtgtctcttgcttcattctgacacgtccttttcatcattccactttgacttgaatagtataatcattcggtttgtaaacttcaactgcttctatcttaccatcattgctcatcagatttgaagataaacctcataaaaagcatttccttatatagaagagaaaatcatatcactaattacctttaggaaatgttacatttttccgaaatctatcatttccttttcacatttttttcaaaatatatgtattgaattagtaatttgatagttttaagataaaagtacaacatagatctgctagaaaaacaaaaaaagggaggattcaattatgaaaaaagctgtcattgtagaaaacaaaggttgtgcaacatgctcgatcggagccgcttgtctagtggacggtcctatccctgattttgaaattgccggtgcaacaggtctattcggtctatgggggtaaggatctcccaaaagggcatagtcattctactatgccctttttaagtaaattacaatttttaactaaaatctacctcttggatatacatacacaaccgtttttcatttgaatcatatgtataggggatggtattttgtttatagagcagatgtttccatttattaatgaaagtgtaagggttcaccagcttcctgagggtggcgtgttagaaatcgactacttgcgcgataatgtctccatttctgactttgagtatttggatctcaacaaaacggcttacgagctttgcatgcgcatggatggccaaaaaacagctgagcagattttagctgagcaatgtgcagtgtatgatgaatcaccggaagaccataaagattggtattacgacatgctcaacatgctccagaacaagcaggttattcagcttggaaaccgggccagccgccatacaatcaccacgagcggaagcaatgaatttccgatgcccctgcacgccacctttgaactgacgcaccgctgtaatttgaaatgcgcccactgttatttggaaagctcacctgaagcgctcggcaccgtgtcgattgagcaattcaaaaaaacggctgatatgctgtttgataacggtgtattgacatgcgaaatcacaggcggagaaatttttgtccatccaaacgccaatgagattcttgactatgtgtgtaaaaagttcaaaaaagtcgctgtcttaacaaacggaacactcatgcgaaaagagagtttggagcttttgaaggcttacaagcaaaaaatcatcgtcggcatttctcttgatagtgtcaattccgaggtccatgactcctttagagggagaaaaggctcttttgcccaaacttgtaaaacgataaaattgttgagtgaccacggtatatttgtcagagtcgccatgtctgtcttcgaaaaaaacatgtgggaaatccacgatatggcccaaaaggttcgggatctcggggcgaaggcgttctcttacaattgggttgacgatttcggaagaggcagggatattgtccatccaacgaaagacgccgagcagcaccgcaagtttatggaatacgagcaaaatgtgattgatgagtttaaagatctgattccgattattccttatgagagaaaacgcgcggcaaattgcggcgctggctggaagtccattgtgatcagcccgttcggcgaagtacgtccttgcgccctctttccaaaggaattttcattgggaaatatttttcatgattcctatgaaagcatctttaactcccctctcgtccataaactgtggcaagcgcaggcgccgcgcttcagtgaacattgcatgaaagacaaatgcccgttcagcggctattgcggaggctgttacttaaaagggctgaactctaacaaatatcaccgaaaaaacatttgctcttgggcgaaaaatgaacaattagaagacgtggtccagcttatttaggagggaaacgatttgtcaccagcacaaagaagaattttactgtatatcctttcatttatctttgtcatcggcgcagtcgtctattttgtcaaaagcgattatctgtttacgctgattttcattgccattgccattctgttcgggatgcgcgcgcggaaggctgactcgcgatgagcattttggatatacacgatgtatccgtttggtatgaacgggacaacgtcatcttagaacaagtagatttacatttagaaaaaggcgccgtttacgggttgcttggggtaaacggcgccggaaaaacgacactgattaatacgctgacaggcgtgaaccgcaatttcagcgggcgctttacactgtgcggaattgaagcggaggccggcatgccgcagaaaacatcagatcagctgaagactcaccgttacttcgccgccgattatccgctgctatttacagaaattacggcgaaggactatgtgtctttcgtccattcgctttatcaaaaggatttttcagagcagcagtttgccagtttggccgaggcctttcatttttcgaaatacatcaacaggagaatttcggagctgtccttggggaacaggcaaaaggttgtattgatgacaggcttattgctgcgcgctcccctatttattttggatgagccgctcgtcggtttggatgtggaatcgatagaggtcttttatcagaaaatgcgcgagtactgtgaagcaggcgggaccattttgttttcttctcatctgctcgatgtcgtgcaaagattttgtgattacgcggctattcttgacaacaaacagatccaaaaggtcattccgattggagaggagaccgatctgcggcgggaatttttcgaggtgatcggccatgaataacataatccccatcatgtctttgctgttcaaacagctttacagccggcaagggaaaaaggacgccatccgcattgccgcaggccttgtcattctggccgtgtttgaaatcgggctgattcgccaggccggcattgatgaatcggtgttgcgcaaaacgtatatcatactcgcgcttctcttaatgaacgcatatatggtgtttctttctgtgacatctcaatggaaggaatcttatatgaaactgagctgcctgctgccgatttcttcacggagcttttggctcgcccagagtgtcgttttgtttgtcgatacctgtttgagaagaactttattcttttttattttaccgctgttcttatttggaaacggaacgctgtcaggggcgcaaacattgttttggctcggcaggttttcgttttttaccgtttactccattattttcggagttgtgctaagcaaccacttcgtcaaaaagaagaacttgatgtttctgctgcatgcggcgatattcgcctgtgtatgtatcagcgccgctttgatgccggccgccacgcttccgctttgcgcggtgcatatgctgtgggcggtgatcattgactttcctgtctttctgcaggcgcctccgcagcagagcaagatgcattcatttatgcggcgatctgaattttcgttttacaaaagagaatggaaccgatttatctcttctaaagcgatgctgttaaattacgcggtaatggcggcgttcagcggcttcttttcgttccagatgatgaataccggcatcttcaatcagcaagtggtttatatcgtgatttccgcgcttttgctcatctgctcgccgatcgcccttttgtattcgattgaaaaaaatgaccggatgctgcttatcacgcttccgatcaagcggaaaacgatgttttgggcgaaatatcgcttttattcaggcctattggcaggcggatttctccttgtcgtgatgattgtgggtttcatcagcggccgtccgatttcagttctcacttttttgcagtgcattgagttgctgctggcgggagcttttatcaggttaactgcggatgaaaaaaggccctccttcagctggcagacggagcagcagctatggagcggtttctcaaaatatcggtcttatctgttttgtcttcccctattcttagccacattagccggcaccgctgtatccttggcggtcattccgatagccggtctggtcatagtctattacctgcaaaaacaggatggtggtttctttgatacaagcaaaagagaacggcttggaagttaacctgctgaagactcatcaattttcaactatttcaatcgccgcgagctttctgaaaccgatcgaaagcgcggcggaacctgaggaagaaacgatttatttttacggcgccgccgcatacctgaaggagcaaattattgacgctttcggttgtgctgccggcagccgtttcatgtactcagcgaatctcttttttgatcagcagctgaaaacctgcgggacccgtttgattcacccattatataacgggaatcttcatgttgacgccctgctgaaaacttttgcagacttgtctttcccttcttctctttcattcgaagcagttgaaaaggccaggaatgagctgctgctgagaatcgaaaagaaattcactgatcctttctcctactcggcggcgcgcttggctgaggaggtcttcggaaacccgatgtacggcacaggcatgtttggccggaaagacaggataaaggcgattcatcctaaacggtttctcgacgcaacggactttatcgttgatttagtgtcccagcaaaaacagctgaacatattgggacaagtacaagcatgtgatgttcggggacatgccccgcaaacgtccgctgtaacgtccgaaagaatacccgtaaaccggcatgtttttgaaacagagacacgcagcgctgcaggtccttccgtcttgacactcggatttgactgcggagagatgaaagatgccagcgattatatcaaaatacagctaatagacggattactgggaaagtacggccattccgctttattcaagcacttcagagagaaggatctggcagtctatcacgttatcacccgttacgatgtcatgaacaatttgctgcttgtttcaatatgtacagatcagcttcatgagatagacattcccccgcgcgttttggaagctgtctcagcttttcatacagatgagcgggaactagaacaggcaaagcagtttttacgcaatgaattgctgctgcaattcgattctcccgaaggtctattggcctatatggggatcctgcgccgcttctcctgcacgaaagaagccttgctggatggcatctcagcggttacatgccgtgatgtattgcaattcatagcgaccatcaattatatcggagctcatgtagtaaggggatgaagagatggaaaagaaagccttttttcaacaactggatgaacgaaccgatatcagatacacagacagcggactaaaaatattcagattgaaattcccccgcgcccacctgcggctgtgcaatgtaaaaatcgattttggaagccgggatgtatgtatacgggcagaatccggtgatacactgcttccgtatggcacagcgcattttttagagcatcttctcttctggcataacggccgcaatctgtacagtgatttttttgcgcatggcgcgcttttaaacgcattcactacctacaccgataccaatttcatgtttacctcattaccggatcggctcagacaaacgatccccatcctgcttgatgctttatggaaccactcatttgacaagaagattgtcgctcaggaaaaagctgtgattacaagcgaaattcaaacagcacaccttaaccatcagctctcatatcattatcagctgatcagcatgctttctccctcctcaccagctgccgttttccccgcaggcagaatcgaagatattgaggcgctggacatcagtgatttacaaaaagcctataaggctgcctaccaagcccatcggatgacgctgtttttgattgggggctcagaaaatacagaaacgcttttgcctcctcacctccagctggaaaaacgtccggattatcatgctgaaagaaaaatcatcccggcatgccctccagccctctcacaaaaaatggtgctgggtgatgaggagcggatggaagatacatggaccggattacagatcggcgcacttcccgggcaaaacgatctgttggcgataaagctttattgggatatcgcggctcgtattctatttcaattagattcaccgttttttcaagagattcagcaaacgtaccgtctggaaatcgatcgcttgtcagccgagacttatatatatgaggatggcggtttcttgatccttcacagtcaagggacccattcttcagcttatatcgatgtggcttcatactatgtcacacagaagaaagaacaggttgccgcctggcttcaatacggcaaggactctttgacagacgcgatcatttatgacagcgattatgtgcgtaaatgcttcgagtgggcagccgagtgtgacaggtgcgattgctcgtttcttgacatgtaccacatcattcaagatatggatgcgcaggttttcttgtctctcattgatgcaatggcatcttctaacaaagcgatcattcacgtttctcagaaagaggcgatcagacaatgaaaaaaagcactgtctttacccttttattgctgcttataggtatggcggcttattccttcggatgggttcaggccgttgccgaagccgccgcccaatatgtacagatgatcaacaatgatgctgttcggctcggactgctggcttgtaccgctgccctcctgatgctgcctgcttttctatatcttcattatgtcacccaatccgtgaaaaacatgacagcagcttttcagaaactcacacagtctcatcaaagctgctgtgactttcagcaacacaacttgtgcagccgatatgcagaagacgtcaaatcgctgcgtgacagctataaaaacgtccgccaaacatacgtgatggctgccgtgttgtgccaagtcatcatattcggctgcatgttcgaaatcgttaaagccgtccctttccgccttcacacgccccctgccctttcaatgggacttgcgatgctactgattctgtatttattgttttgcatgcgaacttatttgcggcagcttttccggcacggcagcctgttcagaaaagtgtttgcgggagcgctggcagcagccgggatttggtggatactcagtttctctataagtgaactgctgtttctgattatcctggctaccattcagcaaatcggatcatttatttataaacgattctcttatcgcagcaccgcttctcttgatctataaaatagctacatcgcaatcgcagacggacccgcgccaaccggaatcaccgtcacggctgtataatcacttgtgcggtacacggtcacagcattgtcgttgggctgtgccgcataaatatactgtttgtccggcgttacggcgaggtcaaaagcgccggggagagacacgtttgcaatgatcctctgtctggccgtattaactacatataagttattaataagaaacggttcactatatggctctagaaaataagctctagtgctatcgagagaaaatacaatcgtcctcagcgtttcaaataaacggctgaagtcccctcccctgcttaatggagacaaactaatctccgttacacctttcggccacagctcaccattcaacacgtacgcaaaatttccagcgtaaggagttgcaattaaactgggaaattcaaatgtatctatgatactttctaccaactgcccagtatttatatcatatttatcaaccgaccaactgcttccattagcggtatagacatactgtccattcggatcaagagcaaagtctaaagcgccgggtatcggaatgacatcaatgaccgattgagaggccgtgttaatcacatatatagatccggcggccatcacgtatgcgaactcatcttttggatcaaattcgatctttctcggccctcctccaacagtaatggtatttatgatggttaatgttttattatcaatcactgagacaaggttggtatttccatggaggacatacgtgaatgctttatcgaaagtaacgcctagattagttggcacgtcagaaaaagggattgtttttacaacagtgtttaaatctgcatcaataaccgaaaccgtgctgtctccagtattggcagtaaacacatacgattgagggtctggtgatggcggtaaaacaagtgtcccggtcaccgtaagcggactgccgtagaaaggcggtacaatgagcagatcttccactgttatttgactgaaatcaggacagcggccagactgtgctgcataataaacaacttgatcaatctcttcggtatgaatcacagaaaccgccccattgccttgtccatattgatttcgcacaggcgacacactgacaagaagcgtaatggtcccttgtactctcacagcatatcgaacaccgatatcttctggttccggcccagtctggattaagcaaggctcactgatacaggacacattgtctgtactccatgtaacagccgctgacgcttcggccgaatcaaccttgaagccctcagggatatctatcggcacttgaaacggcgcttctcggctaatttcctcatcacaaaaacagaaacaattttcctgtaaagcagaaagatcattctttttcatgatttcacgtccttttagaaatgcacaacatgcagcggttaaatcgtaatggcacccggtgaaaccccaagagatatcacagtttcctcagaataatcatctgtgttgtaaacaatgatgctctgctctataaaacgagttgcatacagaaaatcgccattcggggtaaacgcatagtctgttgctgattgcggaagatttccaattacacctgctccattcggactgacagaatataaattgccagtgaagctgtcatgtaaatacacctctgatccactcgtaaacattacatatagcccgtcaggctccagctcttgggtatccctgatcgtaaacgtatttaaatcaataaccgtcaaataattgaataagaattcttgttctaatacatacgcataccgctccgtagaatctgtttctatggatgatacgataagctctcgttcaatcgttcctaagacttcaccggtagataagtccactttttgcactaacccaaaattaagaacataggcgaacaacccattggggtcaattgcaatatcaaaaccttctacaggaatagacctctcaacagtcaacgtatcaattccaatcacataaatggcagtaccggtgaaaacataagcaaactcatgattagggataaatctaatcaatcgaggcggctgatccagcaatatagttgctgtcactgttaatgtgtcataatcgatgacagaaatcacattattgttgggatgtaagacaaacacagcgcttttatctggcgtaatttcaatacctgccggattgtacggaagagcaatcgttgtcacaacagaatgagtgtttgtatcaatcacagaaactgattgatcatttggattcgctgtaaacgcataaacgggttccggctccggtacaagcacaatcgtccccgtcaccgataaaggactgccgtaaaacggcggaacaacaacaaggttctcaatcgtgatgtcactgatatccgggcaatcatccggttcatcggaataatagacgacttgatcgatttctgcattgtgaatgacggaaacagccccgtccccttgtccatattgatttcgcacaggtgagacactgacgagtagcgtaacggttccctgcaggcgcactgcaaattgaacaccgatctcatcaggctctggccccgtttgaattaagcaacggtcactgacacaagaaaggctgtctgcattccacgtcacgtttgcaacagcttcagccggatcaacgacaaatccttcaggtaattcaatcggcgcttgaaacatggcttctcggcttgcttctccctcacaaaaacataagcactcttcttgttctgctcctgctttttctttaaaggaaagcttgttttttctcattccttcacttccttttcagacatacactgctcacgcagatataacagaatatggaagtgtaacgtgtttgcttgtacaaattgctgagggtaaacgcttctttttgaaaatatatctccaaacatgcggtgtaacgaaagaaaaaattgcggtttttttgcgcttctcacaagaatgttgatgataaaatatgacatatatagaattatgaagggagggatttgcaaacgtgacaggtgtcatatcttcttcttccatcggagaaaagattaacgaatggtatatgtacatacgccgatttagcatacccgatgcagaatatttgcgacgagaaatcaagcaagagctggatcaaatggaagaagatcaagaccttcatttgtactattcactgatggagtttcggcacaacctgatgcttgagtaccttgaaccgttagaaaaaatgagaattgaggaacagccgagactgtctgatctgctgcttgagattgataaaaaacaggctcgtttaactggtctgcttgagtactattttaatttcttcagaggcatgtatgagctggatcgccgtgaatatgtattagccattcaattctttaaaaaagctgagagcaagctggtttttgtgaaagataaaatcgataaagctgaattctttttcaaaatgtcagaagtctattattatatgaaacaaacttatgtctccatggactatgcacgtcaagcattcgaaatatacagtgaacagactacatatgatatcagaatgattcaatgccagtccttattcggagccaactttttggatttaaaacaatacgaaaaagcaattgcccattttcaaaaagcctttacacttgcaaaaacagagcagaagccccaattaatgggaagaacactttataacatagcactctgcaagcaaaaccaaaacagttttgaatcagcgatagagtatgtaaaaaaatctattcaagtatttgaaggatctaaaatgctcccttcactgccacaagcttttttcctaattacacaaatttattttaaattaggtaagattgataacgcctgtgaatatcataaaaaaggaaaagagtattctgcagctgcgggagataccgtgtatctaacggagtttgaatttttggaatctttatacttgtctggaccggatgaggaacggatagaaaaatgttttgtttttcttgaaagtaaaatgatgtatgcagatattgaggacttcgcacttgatgttgctaaatattatcatcaacaggaaaattacaaaaaagcatctcattactttttaaaggttgaagaagcaagacagcacattcaagggggggtgaatttatatgaaatggaagtataaattattactcgcttgtttagctgtgagtgctgtatttatcacagtcgaagtatcaaattcatcaacagaacattttgatgttgcgcaacgcgccatgatctaaaccgccgtccatcggcggtttttttgtcccctctttacccaatctcccaattcatgctgtgatttttttcaataatcttgaagagagtggaaatgcagcatgtctctgtaaagtgtgagaacccactttacacagtggaatcgagaaaatgatgtgacggagttcgaaacgtcgagcgcgacagtgttgaacagacagctgagacgatcggcgtaagcccgactagaatcgccaagaccctgtccttcagaggggaaggagatcaggcgattctgattgtggcagccggcgatgccaagattaataacaaaaagttcaggcaaacatttggctttaaagcaagaatgctctctcctaatgaggtactggagcagacaggccatgaaattggaggtgtttgcccatttgggttggctcatgatcttgaggtttatctagatgtatcgctgaaacggttttagactgttttcctcgcatgcggcagcagaaactccgctattgaggagaattatccgaattttctttctcaaaagcatggattgatgtttgtaaagactaggaataaaaaacatccagacatcgtctggatgtttacttatttcacaaacccaagcagcatttcacggatgattttgctggctgtgtttgccgtttgctctgagtggtcatacaccggtgcgacttccactaaatcagcgccctttacgtttacctctgaacgcgcaatttcatggaccgatgcaagcagttctttagacgtgatgccgccggcgtcaaccgttcctgtacccggtgcgtgtgcagggtctaatacgtcaatgtcaattgtgacataaaccggacggcccgccagcttcggaagcacctctttcagcggttcaagcacctcaaattttgagatgtgcatgccgttttccttcgcccattcaaactcttctttcatgccggaacggattccgaatgaatacacattgtgcggtccgatcaattctgccgccttacggatcggcgtggagtgagaaagcggttctccctcataatcaacacgaagatctgtatgtgcgtcaaaatggataatcgcaaggtctgggtatttcttgtacatcgctttaatgacaggccatgacacgaggtgctccccgcccatacccattgggaacttccctttttctaaaatgctgtccacgtactcttcaatcatatccaggcttcgctgcggatttccgaacggcagcggaatgtcgccggcgtcaaagaagttcaagtcagccagatcgcggtctaaatatgggctgtattcctcaaggccgattgacacctcacggattctgcttggaccaaagcgtgagcccgggcgatagctgactgtccagtccatcggcatgccgtaaagaatggcatccgcctcttcccactcgggacggctcgcgataaatacttttcctgaataagcttcatcaaatctcatcgataataccctcgctttcctgtaaaaaagcgcaagattcgctcctgcgccataccttcattatttaatcaggtcactcacaaatttcggcagaacaaatgccgctttatgaatatcttttgtgtaatatttcgtctcaatatcgaagaaacggctgtcttccactgcaagcggatcatattttttcgagccaattgtaaatgtccacaaaccgctcggatatgtcggaatgttcgccgtatacagcttcgtaatcgggaagatttccttcacgtcgcgctgtacatttgtgattaattccggtgtaaaccatgggttgtccgtctgtgcgacaaaaatgccgtcttctttcagcgctttagcgattcctgcgtagaatccttttgtaaacaggtttacagccggtccgactggttcagtcgaatctaccatgattacgtcatattgattttcagattttgcaatgtgcataaatccgtcatctacctgcacgtcaacgcgcggatcatccagtttgcctgcgatagaaggaaggaactttttagagtattcgatcaccttgccgtcaatatctacaagtgtcgcttttttcacgcttgggtgcttcaggatttctctgataacgccgccgtcaccaccgccgactacgagaacgtgctccggatttgggtgcgtgaataatgggacatgcgccaccatttcgtgataaacgaattcgtctttttcagatgtcatcaccatgccgtctaaaaacagcatgttgccgaactcttctgtttccaccatttctaaatgctgaaactccgtttgttctgtatgtaacgttttgttaaccttcatcgtaatgccaaagtttttcgtctgcttctctgtgtaccaaagttcgctcaattgtcatctccctttcgaggctgtattcatttattgtaagcgtcttatcagcttttattctcggttgaaatctcattttcacctaaggaaaaagtatagaggatgccggggaaaaagtaaagatgcgtcctgttctgcgatgtttaaaaacgatctttttttctcataatagtagaaacataaaaaaaggggggaacccgttgtggatgcaatgacaaataaacggctgagactgacgctgaaaaccgttcgcgcctttatctttttaggggcttttgcggccttggcggcagctgccgtgtttatgactgtcattttgatagccaaataccagggcgctccctcggtgcaagtgccgcaatccacgattttgtatgcgagtgacggctcaaagctcggggaaacgaactacggcgaaaagcgctattgggtccccttaaaggacatgaatccgacgatcgtaaaagcgacagtggcgattgaagaccagaatttctacgatcatcacggctttgattataaacgcatggccggcgcggcgcttgctgacctgaaagcatttgccaaggttcagggtgcaagcaccatcacccagcaatatgcgagaaacttataccttgaacacgacaaaacgtggaaacggaaatggaatgaggcgttctacacgatccgtctggaacaaaactattctaaggacgagatattagaaggctatttaaatacgatttactacggacacggcgcctacggcattgaagcagcttcccgcctatatttcggcaagcatgccaaaaacctaaccgatgcggaggcggcgcttttggcaggtatcccgaaaggcccttccggctattcaccgtatgtcaatgagacgaaggccaaggaacgccagaaaacgattgtgcggatgatggaaaagcagcagatgatcagccaaaagaaagcggatgaattgatcaaggaacctctttcctatcagcctttgaataagcaagtttccaagagaaaggctccttatttctacgacaatgcgatgagagagctggagaaaaagctcggcatgacacgggagcaaattgaaacgagcgggttaaacgtctatacaacggtagataaacggatgcagcgcatcgccgaggagaccattaccgaaacggttaacgcgggctctgacattcaagtcgggttttcagccattgatccccgcaccggaaacgttctcgcccttgtcggcggcaggaattatcaaaaaagcccgtttgaccggacgacacaggcgaagcgccagcctgcttcgacgatcaagccgttgctgtactataaagcgattcagagtggatttacgccagtcactttaatgaaaagcgaagaaaccgagtttcaaattgatgcaaagggagaaacctattctccaagcaactataacggatactacgccaacaagccgattacgcttctgcaggcgctggcgctttccgacaatatttacgctgtgaaaacgcatctttttctcggcacgaacaaacttgtaaagacggcaaaggaattcggcattaccgcccatcttcaagcactgccgtctctggcactcggcaccgaacccgtgcgtccgattgagatggtcaacgcctatgccatgctcgcaaatggcggaaagaaaatcgaaccgacttttatttcaagggtaacggacgcagccggccacgtgctgtacgaaaacccgaatcagcataaacaggtgcttgatgaaaaagccgcttttgtcacagcgagtatgatgacaggcatgtttgataccgatttaaatggatatacgtcggttacgggacgaacgatagccaaccgcctgacaagaacgtatgccggaaaatcaggaaccaccagcgcagacagctggatgatcggcttcaatccgaagctggccgcaggtgtttggaccggctatgacaaaaacagcaccatcgactcggtcgaagaaaaaagctatgctaaaaccatttgggcggacttcatggaggacgcgctcaaaggcgaaccggaaaccgcgttcaagccgccaaaaggcgtaaccggtgtgtacattgatccggaaacaggctactcatcaggtcccggctgtgccgctaagcattacacatattttgtgaaagggacagaacccgcaaacgtgtgctacggggcagaacccgcaaaacaaacaaaagaccggcttccatccaaagaaaagcccgcttccgagaaaaagtggtgggacaaatggctggggcgacatcattgaaaataacccggctcctcggaggccgggttattcgtatggttccttcataatcgatggaagaatgttagacaatcgagctgaacaatcagttttgggataaagtggtgaatttctcatttcttcggcgctggctttcatctcccagtcgccgactcatatccccctaaaaatgaaaaaccccgagtcttgtttcggctcgggattttccatgtcctatttctgtatcaccagtttactcaatgtttacgaaaaatatctcaaatactttaaaagttcacagaaaattcataaattaattgttttccggaagcaggcttgtttttaattcatctgatgaacggtcccataggccctgatcatgctttttcagaaattcgcctagtacacgcttcgagctgtcgtccattttatcaacgatgattttccgtttcatggatttatccatcaaattcacatgctcaggcagcgacttgtagcctcttctgatgcttctgtcgaccgtcatttcacaggctgtcacaccagcgtaataaggcccctcttcttttctgtcaatcgttacccacacaagccagtatggttttccgttcggcacttcttctttattcgggagaaatttaattcctttttcaacggtgctgcgggcatgcatggcgccgatgtctacgaacgcttctttttcttctacatcaacgaatacgggagaaatgttatcaaggctgagtgcccctacgccaaaaccgccgtgtccgtctgtcggatcacttttgataatattaaacccgattgattttttctttttttcttccatgaagttctacctcctacaaaagcggttgaaatatcgctgaaaacagctttaaaatcgaatctcttcctgcattgagcatcggccacagcacgtaagatcctagcggtgtcacaaacagcaccaaaaatacgataaagccgtagctctccgcctgcgtcattttggtacgcatgcccggcggaacgagatcttctataattcgatagccatcgagcggaggaagcggcagcagattaaataaaaacaagacaagattcagctgtatccaaatggaaaaaaactgatccagccccgtgctgaacgccgcaagcatttccattccgtacgcatgcatcaacactaacaaaaagaaaccgataaacgcaagaatcaggttactgacgggcccggctatagatacgagcacaccggcaagccggggtttcttaaagaagcggcgattcacgggaatggggcgcgcccacccgaagccggccaccaaaatcaaaatggttccgaacggatcaaggtgtttaatgggattcagcgtcagtcttccttgttttttcgccgtatcgtcaccgaatttgtatgcgacataagcgtgggcaagctcgtgcatcgtaaacgacacaattagcgtgatgacgaggtatggcattaaagataacggataatataaaaaacggtccaagtgagatatccctctttctcaaaatgcaagaatttactttattcagtatactataagaagcctctttttctaaagagaggaaacgagataaaggaggattcagcacccatgccatacgtaactgtcaaaatgctcgaaggccgtacagacgagcaaaaacgcaatcttgtcgagaaagtaacagaagccgtaaaggaaacaaccggtgcttctgaagaaaaaattgttgtctttatagaagaaatgagaaaagaccattatgccgtcgcaggcaaacgcctgagcgatatggaataatctctataaagccggcgcttcgcgcaccggcttttattatccctattgagccagcttcgcaataatcgccaagaacgtctttttctcttcggctgttaaacgttcaaacatgccatcaatcagctgctggcggttttcgatcatttgttcagccgctccccggcccgcttcagaaagcgtaatccatacagtgcggcggtcattgttatttctcgatctctcaataaacccttcctgctctaaatgattcagagctgtggtcgtggcagagggagacagtgtgacctccttcaaaatatcctttatggtgcagctcccatgtctgtatatgatccgcagaataaatcctcttacattattcacgtgtttcggaacggtggcttcatctaattgcttcgtgcttttcaaatattttgtaagtgcgtgatccagcaaatttgcttccagtttgtcatggtccatgtcaatttccccatttcgagatgcattcataacatacgaacgatatgatttacttattattttactgattccgaatagggaaagtcaaaaaagcaaaatgtgaattcacagcttttatcctacatgcctcgattttccacctgtttgacaagcttatctttaaatgtctgaaaaggaacatgttcattctgctgatgtccgaatcggcggacgtttaccgcattctcctgctcctcatgatctccaagcaccagcacgtacgggattttctgcacctgcgattctctgattttatagccgagcttctcattgcgctcatcaatgccggctcttatccctgcctgcttcagctccgcctgcacctttctgcaatagtctaagtgaacgtgcgaaaccggtatgatttgaacctggagcggtgcgagccagactgggaaagccccgccgtaatgctcgatcaaaataccgaagaaacggtcgatcgagccgaaaaccgctctgtggatgacaacgggacgaaccttttcattgtgttcgttgatatatgttaaatcaaatttttccggcatttgaaaatcaagctgaattgtcgcacattggtggctccgtttcagggcatcttttatgtggaaatcaattttcggcccgtaaaacgccccatcaccttcattgatctcataagagaggccaagctcctcaaggacgcgtgctaaggcacgttccgacgcttcccaaaggctgtcatcgcctaatgaatcctccgggcgagtcgaaagctcaactgaatactcgaaaccaaatgtccgatatacctcatcaatcagccgaatcgcttctttgatctcactctcaatctgatcctcccgaacgaaaatatgggcgtcatcctgacagaacgtccgaacgcgaagcattccgtttaaagcgccgctgtattcatggcgatgcacctgtccgaattccgccatgcgaatcggcagatcccgataagaatacaggctgtttttaaagatgagcatgtggccggggcaattcatcggcttcattgcgaatcttgtatcatccacttctgaaaagtacatattgtcgcgataatggtcccaatggcctgactgctcccataaccgctgattcatcataaacggcgtacgcacctcatcgtagccggcatttgtttgcagctcacgcgagaagcgctccagctcattgcggacaatctgccctttcggcaaataaaacggcatccccggcgcttcttcagaaaacataaacagccctaactgtttgccgagcttgcgatggtctcgttttgccgcttcttccagcatatgcaggtgcgcatccaaatcttttttcttttgaaacgcaaccccgtacacccgctgcaggacttcatttttactgtctccgcgccaataagcgcctgatactcttgtcagtttgaacgccttgatcatccctgtagaaggaagatgcggcccgcggcacaggtcaacgaattccccttgctggtacagtgtgatatcctccccgcgcggaatatcctttaaaatctcaagcttgagccgctcgtctttttgtgcaaacagctcttcagcttcttcgtaagaaacctctatacgtttgatttcaaggttctcatttattatgtttttcatttctttttcgatggcccctaagtctcctgatgccaagcttttccccagcttcatgtcatagtagaagccgtctagaatcacaggccctacccccaatgacacttcgccgtacagccgttttactgcttgggccagcacgtgcgctgttgtgtggcgaagcacctgcaagccttcttgtgaatcgagtgtgacaatcgaaagctcagcatcctcctccagcttgaaactgagatcaacaagcttgccgttgacctgacctgcggccgccttcttttgcagactggaactgatagaaccagccgcttctttgattgtgatgcctttcggatattcctggatctgtccgtccggaagctgaatgtgtacatttttactcattttaaaacactccttattcattgttgtatataaaaaaacacacccgtcccgcagatagggacgagtgtgtgattaacccgtggttccacccaagttcccgacaaatactatattgtcggctcggtgctgtaacgcagcatagacggcattggatacttcagttccccaatgctgctccaaggcggtaaatgatattcctaagctgggaagctctcacctttccttccctctctgaaaaccgtaactatcattcgtgtccttttcaacgcatttatgtagttcatataaaaaaacacacccatccctctaaaagggacgaatgtgttgatcatccgtggttccacccaaattcccgatcaattacacatggtgatcggcttaaagatgctgtaacgcagcatgacggtatcagatacttgttttccccgatacggctcaaaggcggtaagctgctttccctgcgttaggaagatctcagctgtccttccctctctggaaaccgtaaaaagcatctcgtgtccttatcagtgcctgttgtttcaataattttttacatcttactatatattcccacaaagtgcaatcagtgatttacattttttctgacgcggcagtcccgttatgggcagccagaaacagccatacaagcaatgcagcgaggctgtatgcagcccccatcatcaaaaatgtaaacccggcaccggcataccaagtggcggacagatgaatgatcaccccggttatcgctacgccgaccaaggctccgatttgccggtttgcatttaacgccgcaccggcgatattcgcatgtctttgcccggcagcctgcatgatcacagttgtcatggcaggaactgtaataccggtacagaggttcataacagacatcaacaccgccagctgccaataaggaaaatccggagaaatcagcacaaacaacagcaatgcaatgatacagctgaccgccattgatacaaacataagctgcccggcttcaaatcgattcgccagacgggcaaacagcagattgccgaacacgaagaccgccatcatcggcagcagctccactccagccataaaggaacttgcccctcctgcttcctgcaaaaaaaggctgagcataaacatgccgccaaaaagggcgaaattcagcaaaaacccgataaattgggcagctgagaagcggccgtttttgtataaggacgccggcaggatgggtgcttttgcagaaatttcccgcagcaaaaacagcacaaatgccaaaatcgctgcagtaaatactacaagaatcactggcgagcgccagcccgctgaaggcccctgtatcaaagcataggaaagaaacccgagagccatcatgccaagcagatgcccgatgatgttcacgcggctgctttttcccggaacgcggctgaggattcggtaagctgaaatgagcgcagcagcccctattggcacattgatcagaaaaatactctgccagcccgccaactctaccagcacgcccccgataaaaggcccaagggctgaagcggcagaaacaagcgcggcccacagcccaaacattctcgcccgcgcccgctcatcagggtaagaggcagccaaaaggctgagtgagcttggcataaacaaagctgcgccaattccctgtataaggcgtccggcaatcagcatctgtccatttatagatgcagcgcataaacaggaggccagaacaaaaacggctagacccaagatatagatcgtcttcgagccgaaacggtcagccaaggctccgcccgccagcagaagcgacgcaaaagtaagaatgtacccgtccacaacccacgttacacctgaaagtgacattgaaagagtgtttttcatatcagccatcgccacattcacaacggtcacatcaagagttgccatgaggaaaccaagtgcgagcacgatcagcacggatatgcctgttgatgatgttgattcttgtatagacccactatttttcattacaattgccctttcacttgcttgattacccaatcatctattttttcaagatcatacaattccccgactctgtccatgacatgctgcaaggattcttctctcataagattggaccatttatcctcgatttcccccatgactgtctccagcacacagtgactttcaccctcaaatacagattgcagcaggcctttcccctgatacatcgaacctctgccttcgaccgcttgataaacatcataaagcgtaatgtcagccaaaggcttcgtcagggtaaaaccgcccttcgtccctggcaaggattctgccaaaccggcttgaactaatgttctcatcagcttcttcaagtaagacggagacacgcgcaatcgctggcttatagcctctgacgtcaaagaagcctgtacaggcagccttgacagtaacagcagcacagaaaccgcctgctccattcctgatttcattttcatcctattcactcccgattcattatggataactattatccataatgaatctcttagcagcttttgtcaataaaaaaagcaaaagaaacgattcatttcttttgcttagtatggttaacaaatctgcttcagttcctctatgtattgaagcgcttcgtcatattcttcatttgtatatttttgcttgcttttgatggtaaagactttttctttcttttcctcatcctcaagcccgtcaaagtaaaggatcgtggaaaccagctctaaaaaccgtgatgaacggctgtttacactgtcgatatagcctttcatatccggcatgtccagatcagcatggtctaaaaatgcggagcctgtctcagtcagcgaataccggtattgaaagtagccgccctttttttccttcacctcatgcagaaatccaaggttgcacagctcttcaatctggagcgtcagttcctccgaatacggtccataaaagtgaaaatcatatttctcatagaaaggaaactgcattttcttggcgatataaatcattttctgcagcttctttcgcccgatgatttctccagaatccgagaacaccttcatcagttttgcatgttctttcaacaaattcccgacatctcctttttccttctttccaatttctatgtcagtcccagcagctgccggattttcattttcgcttccggatgttcagagccgtcacaaatcaagtcctttggatagtacagcttgtggtccgtccgccgtttacctgagatggattccacaatagccgactgcctggacagctctttaatttggccgttttgcgtcaagagatggatcggcagacgctcctcttcctctcccggtcggtaaaaatcgtatggcagatctgatgaagaatcaacgaccaaataatagctcggatcgattcccgcctctttgaacaatgaagtcagctcaaaataagccgacatttcttcattcggattgaattcaacgtattggaacagctggcggttaatgaatctgcggcacaagtcggataaaatcgcgtcttcttcatcctcccaggcctggaagtaatacaaaataatagattcatccagctttacataatcctccagtgtcaatttcccttcaaaaatagaatagaaatgaaccggagcgtgagtgaagacatagccttcatcgtgcagctgcttcgccctgtgaagaatcttcgttaaaatgacctctgcacttctggtcacaggatggaagtagacctgccagtacatttggtaacggctcatgatatagtcttcgacagcgtgcattccgctttctttaatgacgatctgatcctcgcgcggccgcatcacccgaagaatccgctccatatcaaaatggccgtagctgacgcccgtataatatgcgtcgcgctgcaggtaatccatgcggtctgcgtcaatctgactcgaaatcaggctgaccacttgcttgtttttatatgttttggcaatgacttcagcaacatcctgagggaaacccgggctcacctttctgagcacctgattaacctccgtgtctcccaaaatgatacctcttgtaaaatcctcgtggtcaaggtgaaagaccttttcaaatgaatgcgagaacggcccgtgcccgaggtcatgaagcagcgccgcggccaaacagagttcgcgctcactgtcatcccattcagggcggcctttaaagacgtcatcaaccattcttctgacaatttcatagacaccgagagaatggttgaaccggctgtgctcagccccatggaacgtcaaataggtcgttccgagctgcttaattctgcggagacgctgaaattcacgggttccgatcaaatcccatatcagcttgtcccgaacatgaacatagcggtgcaccggatctttaaacactttttcttctgataattttccatttggatacgccatcgtcattccctcttttttttagccgtgtttctattatatcgactctattctttgaaaacatccttgaatttgcccggcgatttgttccatcttcatgaaaaacacatcttgtgaagcaaaaaagcctgacctgagggccgaggctaagaaaaaatatgtttttacttttttattttcttttttactttgtcaatcagctcatcctctgtcggagctgacagcgggcgattgttcacaaaagcaaatgattttttccgtccgggcccgcaataagattggcatcctacctcaacctttgcgtccgggtccacttctttcaaacgcggcagcaatgttttgatattagtggcttggcaatcatcacacactcgaaattcattagccatgacgtacgcttcccttcatttctatgttcatctatgtgaataacctaaaatcacgtttcaaaaaaaatcacatcactcttcattttacaaggattcgactgttcctgcaagccgctccatccttcgtatctcctattctttcagccaatttgtataaatattttccaacctggacattctaataccatgaaaagaaaaatgggagttgagataaatgacaaaacagcgacaagacgcttggtcagaggaaaacgatctgcttttagccgaaacagtgcttcggcatgtgagggagggcagcactcagctgaacgcctttgaagaagtcggcgataaattaaaccggacatccgcagcctgcggattcagatggaacgcagtggtccgccatcaatatgaaaaagcgcttcagcttgcgaagaaacaacgaaaacagcggatgagagcgctcggaaacgggcagcccgcgaaaaaaagattattatatcagcctcctgccgttgatcctgaaatcattcaagaaaccgctgcagaagagccggttaaaacggaaacaccttctgtcgaaaatgagcaacctttaatgtctggcgaacatatgccttttgttgatgaaagctttaaggaagagttagctagtctatcacacttattgtctcctcaaacgcctgcagctgcgcctgagatgacgatgaatgatgtgatccgcttcctgcagaattacaaaggcaataacgagcaatcatcagcattaaaaatggaaaacgagcgtttaaagaaagaaaatcaggaattgcaaaacaaaacagagcagctagaggcagaagttcaaaagcttgaaaaagaccaaaaaacgatccaagaagattatgaaaccttggtgaaaattatgaacagagccagaaagctagttttatttgaagaagatgaacatgcctctccgtccttcaaaatggaccggaacggcaatttagaaaaattagcggaatgacatagaaaaatcccaaaacgggcagctgttttgggattttcgccatgtgcaaaatccccttttctattgagaaaagagaatttcctcattttgcagccggatcagctattcttgtaaaatgaggccaagcttatgtgaatctattaagacatgtgagctgcctcggccgttttttgtttccgaggcgcagcagaaatgaccaaaagccccagcatcataagcgcaatgcccagccacgaggaaggcgaaagcatttcccctatgaaaaacacgccaagcaatgaagccgtcagcggttcagctaaagacagcgtgaccgccgccgaggccggaaccccggtaagccctttcgcaaacaaaaagtatgcggcacatgttgcaattaacccgatgtaaaggcttgttcccagtcctctaggggtcaatatccacgagatatctaactgccataatagcggcgtcagcaagatggcgctgatcatgaatacaacggcggaggtcgctcgcggaggctgggttttcatcatcgctttactgatgagcgtatagcctgcaaaagaagcacccgctccaagcgccataagaacaccagccacatcaatccgaacattggaactgtcggaaaacagaagccagcaacccgctaaagccagcacagtcgcaatccaccaagagtttcgcgggcgtttcttcaatacagcccattcgagggtcccggcaatgataggcgcactgccgatggcaatcacagttcccactgcaattcccgtttctttaaccgctgtgaaaaacagcggctggtaacacgccatacaaacagcggctaaaaatacgagcggccatgaccaatttttcacgtgaagctcccggctgatccaaaccgcaagcagcatggcgcttcctcctattaataacctgaacgctccaaatgccagcggtgtggcgctttctggagccaacgcctgaacggttcccgtagttccccagaaaaaagccgccatcaatacaaaaaggctgtaaatattccccttcatctgcctctcccctttaatatggatgctgatgtcattttatcgtttttctttttgtcgtggttatctgtatgtaagaaggatttatctgaaaataagattgtggggtaaaatgctgcttgaaataaaaaatgtatgccggcatatacagccggcatgcgaagaacgttcacccaaatacctttgcattccgctcagccatccggacgaggtttttctcaaattccatttcctcatcaatggacagtccagctgaataaagatgggtgcttaacgcttttaattccgtcaataaagcgaacattaagtcttgtacggagatgtctttttgcagaagctcacttaaggacgccatcgtttccggacgtatttccggatagacgccttttttatcgttttgcttgtctttcagcgccgcttgatagaatcgtctgatcaagtcggccctttcactgccgcttttatctgcacagagataaatttgaacagcgactccgccgcgaacgcgtctctgagagatgccggcgaactttttgccatttatactgaggtcatagctgccgggacaataagacccttcaatttcataggcttcgatctttgcgttgtacggtctcagcattcgtctcatcagctcgaccatcgcttcatatcctttgtctatatcgatgcctttcttttcgtcctcgaatatgagagagatatttaaaacaccgtcatccaatacgacggcaagaccgccggaattgcgtacgatcacacggtatccttcgctctccagcaaggagataccatcctgcaaaaacgggaggcgtgtatcctgtattccaaggacaattgtatcgtggtgcacccatgagcgcgctgtcgccggcgacacgccttttccgacggacatgcatagcgtatcatccattgcgaaggattgcttcgcatcaaataaagggccgagactggattggtcaatgactctccatttcggctgcatcagtaaatcaatcggttggtttgccatctatgtaaaaccctttcatgttaggcttattgaacgaaaactattatatcatttcagcagctgtgattgataattgcttttcagcatcgtaataaaaatttctttattttttgtattctccatgagaggagaatgaatgtaagacagcttgcgctttaacgagaaattattaatatgcagaattgaaatttcgcggtggatcaaatccttacgcagcacgcttctggatagaaccgaaagtcccatgccgttaatcaccgcttcctttacaccttgattgctgctgatggtaaacattgatttcggccgaagtccatttgaactgagtacatgatcgagatattctctcgtcccggagcctttctctcttgtcacccacgcttcgttctgcaaatcgctgatcgaaatctctttccgcccggcgagcggatgctgatttggagcggcaatgcacatttcatcctccatgaacggttcaatttccagctcattctcgtttgtatgtccttcaatcagcccgatatcagcctgaagcatacgcacacgctcgctgacctcctctgtattgccaatcatgacatcgaggttcagctctggatacagcttttgcagctgggccaatagcggcggaagaatatactcaccaattgtaaagcttgcagctattttcaattcgcccttcacatagtgatgatgcgcatagatttcagccttggcttgttcgtagagaaacaccatttgctttgctctttgatataaaatgtctcctgtcggcgttgtcgtaaagtgttttggcgacctgttcagaagagccgtttgaaattctttctcaagatttttgatatgcagactgacgctgggctgggagatcatcagcttttctgccgcttttgtgaagtttttttcttctaccaccgctataaacgttttcagcacgtcgtaatacaaaaaccccacccctgtcattaatgaaatatatggttatgattagttttctttattgtactcatatcatccgtcttggtaaagaaggctatacagaagcgcaaaaaaggcagccctcggtcgagagctgccatcgtcttcatttttattacagtgcttgcgccgctgtaattaatgcgagattgtaaacatcttcagcgttacatcctcttgaaaggtcgtttacaggcatatttaaaccttgcaggattggtcctacagcttcaaagttgcccaaacgctgagcgattttatagccgatgtttcctgcttcaaggcttgggaatacgaatacgttagcgtcccctttgatctcggaatccggcgcttttttctcagctacagatggaacaaatgcagcatcgaattggaattcgccgtcaagtgtcagttcaggcgctttttctttcgcgattttcactgcatccgctactttttctgtttcatcagattttgctgagccttttgtagagaagctgagcattgccacgcgaggctcaatgtcgaacatttttgccgtattggcactttcgatcgcaatctcggcaaggtcttggctgtcaggcgcaatgttgatcgcgcaatctgcgaatacgtattgctcttccccgcgagccatgatgaacacgcctgaagtctttttcacgccttcttttgttttgatgatttgaagagccgggcgtacagtgtcagctgtcgagtgagcagctccgcttacaagtccgtctgcaaggcctttatacaccagcattgtaccgaagtagttctcgtctaataacgctttgcgagcctgttcttctgtcgctttgcctttgcggcgttctacaaatgcttgtacaaggtcttccatgccttcatatgtatgaggatcataaatcttaacgccgtccagcgtaaggttcaattcttttgcttttgcttggatctcattttcattgccgatcacaatcggattcagcactttgtttcctgcaagcttgctgaccgcttctaaaatacgctcgtctaagccttcaggaaatacaattttaacgtcttttccagctactttttcttgcactgttgaaaataaatctgccacaataaaacctcctcaaaaagttacaaaaacgctttcttttactagcatactcttcttccaatcaaattcaaacagccaactttcattatagcgctttcataaaaaaatcttatttttctaactaatttaagtgactcaatcttcccttataggttcttctattttgatggagttatacggaagggatgttcaaggtttctccacagtagaatcggataaactatggtatagtgaaggcaatcatgaaaagataatgggagtgaagataaatgagtgaacagcaaatgacgaatgaagctgcaaaaacgcttgacggctggtatgcgcttcatgatttccgcacaatggattggacttcctggaagctgctgtccagtgatgagcgccaatctatcatacatgaattcaccgggttgcttgaaaaatggggcgtagcccaaaaagaaggaaaaggatcgcaaactctttacagcatcgtcggccaaaaagctgattttatgctgatgatccttcgtcctacaatggaagaattaaatcaaattgagcttgaattcaacaaatcaagacttgctgagttcaccattccggcatactcctacgtatcagtggtagagctgagcaactacttggcaagcggtgacggcgatccttatgaaaatccgcatgtgcgcgctcgcctttaccctgaactgccggaatcaaaatatgtatgcttctatccaatggataaaagaagatccggcaatgacaactggtatatgctttcaatggaagaacgcagaaacttgatgagaagccacggtttaatcggccgcagctatgcgggcaaagtcaaacagatcatcaccggctctgtcggctttgacgattacgagtggggcgttacattatttagcgatgatgtccttcaattcaagaagctagtgtacgaaatgcgttttgacgaagtcagcgctcgctatggcgaatttggttcattctttgtcggcaatcacctttcgcttgatacacttcctcaattcctatatgtataatatcccctcccgccctatccggcgggagtttttcaatcctcctttatcagaatttaaataaaatttgctattttcttcgttttttcttacgatgtagataataatccaattttttcaaaggggtgcagttatttgtcaaaacgaaccgcatttgttatgggagccagtcaagggatcgggaaagcaatcgctctgaaattagcagaccagcatttttccctcgtcattaattcgcgaaatttggataatattgaatctgtcaaagaagacattttggccaagcatcctgaggcgagcgtcattgtccttgcgggcgatatgtctgaccagcatacgagagcgggcatttttcaggaaatcgaatctcaatgcggacggcttgatgttctgattaataatatcccgggcggcgcgcctgatacatttgataactgcaatatagacgatatgacggccacgttcactcaaaagaccgttgcctatattgacgctatcaagcgtgcttcctcactgatgaaacaaaacgagtttggcagaatcatcaacattgtcggaaatctatggaaagaacccggcgccaacatgttcacaaacagtatgatgaatgccgctttaattaacgccagtaaaaatatttccatccagcttgctcctcacaacattactgtcaactgtctgaatcctggttttatcgctacagaccgttatcatcaatttgtggaaaatgtgatgaaaaagaacagcatatccaaacagaaagcagaggaacagattgcttccgggattccgatgaaacgggtcggatcagccgaagaaaccgcagcgctcgccgcgtttcttgcctctgaggaagcctcctacatcacgggacagcaaatttccgctgatggcggcagcatgaaaagcatataaaaacatcccgctttttagcgggatgtttcttgtaatgacccgaacggcaggttcagcttttgaatccgcgtgacaaattcccgcagatcctcctgcttcgacaccattgagattctgacatgcctttttccgttgcttccaaaaatttcgcccggtgtgactacgacatgggcatgctccagcaagtaatcggaaaattggtgagatgtctcaaacgtattcggaatttcagcccatacgtaaaaggttccttttggcttttccatcttccagcccaattccttttcgcaaagcgccgtaaaaaagtcaattcgttccttataaattcgtttcaacgattccgtatgctccggatctccagaaagcgccgcactcgctgcctgctgcagcccgccgaacatgccgacaaatacatgatcctgaaattcattgacggcctgaatgatcttttcgttcccaaccgcaaacgccattctccagccggccatgttaaatgtttttgaaaatgaataaagctctgctccgacaattttggcatcctctgcctcaagaaaactggccggtttttgatcgaattcaaacgctccgtatgcaaaatcatgaatcaaatggatgttatgctctttcgcaaaagcagcagctcttgcataaaaagccgcatcagccacagctccagtggggttgttcgggtagtttaaaaacataagcttcgctttttccagcacggctggatcaatcttttcaaaatccggcagatagccattttcttcatacagcggcatttcgtaaagctcagctcgcgccatcgtaatccctgataaatattcaggatagcctggattcgggactaaagcgatgtctcccggattgagcaggcattgtgtcagcacatacaatccggctttcccgcctccgaaaagcgcgacttccgtttcaggattgattgtcactccgtattcccttttatagaaagcagcgatcgcttcctttaaaaaaggatagcccctgaaagggccgtatccatgaaacgaaggattcagagaagcctcccgcaaagcctccacaatatgcggcggagtgggaaggtcagggttcccctgtccgagattaatgatatgggcccccgttttttccaattcctttaccttttgaaaaacgagagaaaactcctgccttggaagtgtcttgatgacatcggacggtgttatttccatctaaaagactcctttttgctccgttttgttatcccgttccaaaaacgatttgttgacgagcttcgtatgcagaaacaaaccgcatacgatcacgacaatcagccccataatgaccggagcgcttaggatgttaatgaacattgaaccaatagaaatgcataatccgatagacgcttcggccactgaaaaaatgcgcccttgaatctggtttgccgcattttcctgaaccttcacttttgcaagcacttccccgtattccatcgcgatgaaaaagaggatcgccgcgatgacagaaacagcgaaaatcggcgtgaataaaaacagcgccagtgagacaatggataaaacggtaaagtacgtcaggcctctattgttgttaaagccccatttgctgacaagcaccgctccgataaagccgccgaagccgatgcagaacgtgagaataaagttgccgatttccccgtcacccagaaagcggctgacaatcggaaaatagctgtacacaactccccacagcaaagccattgtaatcatcgtaaacatggcgtttaatacgaatgcattggttttgatttccttgagtccttccttaaaagactgaaaggcctctttaatgttttcagattgaatcggcacaaattgcagcttgatacggctgataaaaaatgccgaaaccaggtatgtcaaaccgttaaaggcaacagccagctctacagatccacctaacagaaagagccctccggcagccgccccgacgataatggagatggttgtcgcttttgcaaataacgtgttgatgcttttaatatctgattccaaggacgacatgacagcgagacgggcgggattaaaaaacacgccgcttccataagaaataaacagcagggccagaaaaatcagcggatactcgccttttggaagaaatgtgagccccaaaaagatgatgcctctgatgatatccgtccacagcatgatcttaattctgtctaaccggtcgaccagaacccccaaaaacggctgaaacaccatcggaatgcttctgaccacgatgaccccggacgtcacccaataatcgtgataatatgtagacaaaatgagcagggcagggagaacacaatagtctcccatgaacgatagcgcctgcccgtaaagcaagtatttagagttgggtttcagctgtttcatactggcagcacatactttgccgtcagctttgcatgctgctgaatttgtctgattgattcagccacatcctgtgaattactgcctttcagttcaaatgcagcaatggaattgaaagcttcaaacaatgtcaaatcaattgaagtgcctggtgctgcggccgaaaaagaaacgatttcagtatccccttttaaaagcccgtccggaatatcgatcgcttcaatgaccaaatcctcagcggtttctggaatctggccattttgtttgaaatgctgcgggtacaaatggcagtcggcgacatagtaaggctcttgatccaataatccgtccggcagatcggcatcttttccgaaacagaggacatctaataataattgcgccatatcaaggccgaaaacctttttaatgttagggatcatattccagccggcaaatctggctgccgattcaattaaacccggttctctgtttttcattagcttgacctctgtatgtgttgcgcaattttgcaggccaagcccttcatttgcctttttggcagcttcgacaattttcttttttgcctcttcatccagaatggacggcgtaatgtgggatgtctctgtaaacccgatttgcggcgttttatcatgaatggcgatcgggaaatactcaccgtcagccatgatgccttctatactgatatagtcggagtacccttctgtttgataccagtctccgtactcaccctgtaaaaattcttcagcgataaacggcgcttcaaacgtaaccgcctttggcacgttaattgatttcagatagtcattgactctgttaaattcatcttctgccgtctcagtgtccgtaatcagcgttacaccgatagaactcgctaagtatgtaggctttaagataagaggtgtgccgatctcttcaagagcagcacggaaatcttcaagagttgtgactcgtttgtttttgatcgatttgactccggccttattaaaagcgtccctcattttatttttatctctggcattttcggctgcctgcacgccggcacctctcaagcccagacgttcacaggctttcgccatcggagcaatgaataattcattgtttgttgtgatggcatccgccccaaacatttcggcaaccttgacgatttgctcgacgacctcttcctcaggcttgttatgatcctcatgcgcccaataaatggagtcaggatgctcaaaatcagctaaactcttaaaatagtctttatcttttacgaccgcgaccgagtatttttcaatcaatgctgcatgggaggctgtaattgcaaaaggtcttggaataaagctgaccaggttatatttttcagcagcgcttttataaaacatgtgcggcgggcagcctccaagatcagcgatgaccaatactgtttttctctccatatgtaaaacactccttctctattgtgcggtgtatcctccgtctgcggtgatggcgcttccggtcatatagcttgataaatccgaggctaaaaacagcatcacgtttgcgatttcttcaggtttcccaagcctcagcagcggatttaccttcgccttttcttttttgatctcttcaagtgtgccttcattattttcaaggaatgatttttcattcagcggtgtgtcgatgatccccgggcatacgcagttcacgcgaatgtgatgcttcgcataatcaacggccattgatttagtcagctgcaaaaccccgcctttgctggcgttataagcaggaatatcaggccatgccacgagtccgccgacagagcacgtattaatgatgttgcccttgccggcggccagcatatgcttgagtgcatgtttgctcattaaaaacatgccggtcaaattgacttgcagcaccttgttccaatcgctgagctccatctcgtgaataggcgccacgatttcgatgcctgcattattaatcaagacatcgagcccgccaaatgtatgaaccgccgattcaactgcgtgctggcaggcagcttcgtctgtgatgtccgtttgcacaaagtgcagcctgtcattattttcttttcgtaccattgcttctccctgcgcttcatcaatatccgccacaaccacattggcctgctggcccaaaaaagcctgaaccgcagcataaccaatgcctgatgcgcctccagttataaggacggttttatcggtgaggttcatgatcattcatccgccttcattttttttgcttttgctctgttgtagcgcggcgggaagaagatattaatcgattttgattctttttccgaacggttgatggcaccgtgatcttcacgaggctcacagaaataggctgtgccgaatttcatctcgactgtgcagccttcgaccgtcatgtcatagccgccgccgatgcagatgcctatttgttcattccgatgtttatggaaaggcatttctccgccatttccagggattttggcaagcataatttctacccaatcctcaacaaagaacgtgacttccatgcccggcagcaggtctcttgttttgaaaatatccaaaaagtagtcctcaggacttgtatatgtttcatcagctttcagccgcttgatatcaatagcaatcacttcttggtctgtgtcgtttcttgccccatgtggcacatgcggcggcgcgatataggcagattccaaggctgtcatttttcttgtcacatctccgacagtcatcatcagctcgccagaaacgaccatgccgatttggacctccttatgctgatggggttcaacattggtatgcggcgggacgtaagacattaatacttcagtatcccctcgtacggttgaatactgcctcactccgttttcccattcaattaatttcggtgtcgggaaataaagctcctgcatatcttctttagttttcatcatcaacgtctccttttccaaataatgaccagctcattggaatgcttttgaatgtttttacaaaggttagcccgtacttttgccgtgcaagctcattggttaaggcaatgtcatacaaaccttcttttacttttcttgcggcttgactggttgaattgactagtttgaaacgaacatctttgcgggtaaaatattttattaaattaataggtgaaggatgtgaaacaataacagatgtatcaagcatatcgtctctgaattcaaaatcaggacgaacagccaggccgtacatcggtgtatcgcacctgaagatctgcaatagctgcaaatccggcctcatgtagaaatgcttaatgccatcgtaagcatgtgggacgatggtatattccagcgggctttggagcgtcctttcgatgcatgattcaaaagtatcatgcaaggacaatttactgttcagcccttgtagaagagtaaaattggaaatgaaatgctttgctgcgtactcactgcttgtcccctcagggccgagcgtgttgactgtaatgagtttggatagtgaatcagttcttttttttgtctgaatgctattatccaatataatcatgagcaccaaccaatcttttaaaattttaagtaaattttatccagcggcaattgaactgtcaatgttttttgaaaatattgataattattcccatacaaacaaaaaaaccctttaaaaagggtttttaattataggaatttagaaactttgtttattgagataaggactgatcggccttctgctcaagcttgccgtactttttatatgcgaatatactgagcacaaatccgaggactgtgatggcggcgcaaatcaatccgacagctgcatagccgtatgccacatatacgggtcccattaaagcagaacctaatgtcacggccagattcgaggcgaggctgtaaaacaccatgacttttccgcgatgacgttctgagcagtcactcaaaatggtgctgagcagcgtcaccgtcaaactttgcattaatccccaaataaataggctgacgattaacagaaacattgacgccggcgcatatggtaaacacgccagcagaacgctgatgacccccagcgcaatcaaaagggagcgcatttttccgatgcggtcggctatctttcctgtaatcacactcatggaaaacccgattccataaatcatgataaataagcccgcagccgtgtttcctccggtaaaaacgtcctgaagataggtgcctaaaaaggaatacataccgtaaaaaccaatcatattacagaaggttatcgtgatataaacaggtacacgagggactttcagcgcatcccggaatgttcctgccggctcttctatttcttccttgccgctgtttttatgttgggcatggcggcgcatttcaaggagaatcagcaggacaactaaaacacccatcagggcgaaaatccaaaacgtccatctccaatgcaggacgccgccgataaatgatccgagcggcactccgaaaatcagcgccagcgaccagcttgaaacgatcagccccatcaccttgccccggtatgtataaggaacacgatcaccgacaactgcgtaagcggtcggaacaaacgctcccgcagccaatcccgaaagcgcccggcctaaaaagaagaaaaaaatattttgagccaaagcgcatatcaccgttcctatgataaagatcataagcccggctaataagctcagttctctggagtatttatcgcctaatggaaccaaaagcggcgcaccgataaaaatcataacgccgtaaatactgatagataatgcaaggacgctgacatctgagctgaaggcttttgctaaatccggcagcagcggtgagattacaagctcttcagatccggccgcaaatacccccatcgttaaagccagtgccaacaataacggaaaatgatgttttgttttgatgtcattgttttgattgctgttcattctttctcaaacacctcttccataatcttcttatcataaagttgtattatagtttagcattgttttttcactatttacaattcgaacgaaatatttataagttttattattttcatttaaatcccattatatatttctatatttcattctaaaaatacatgaggatgtaatgcgtaaaaaaagctctccggcctcccggagagctttttctattgtgcctctgtctgctttttttcaatcgtttcatgatttatacgctttttgatgcttagatgatagtatgcataacagaaaataatgatcggcacaccgcagtataagccaattctttgatccggaatgaaaataaggctgatcaacacgcagccatataaacaaaatccgagaatcgggactagcggataaagcggcgttctgaactccagatcattcacatttccgccttctgcaaggaaacgtctgcgaaagaaaaattgcgacgcacaaatggacatccacgcgacaactgtcaccatgcccgagattgagatacaccataaatacactgtttctgcggccatgacacttgtcagcagcgaacagcctgaaatgcctagcgtaatcagcagggcattcatcggcacgcctttttttgtcagtctggtgagaaaggatggacccatttgatttgatgaaagtgaccacatcatacgcgacgccgcatacaaccccgaattagcaacagataaaatggctgttaagatgacaaagttcatgatatctgccgaaaatgggatgccgatttgatcgagtaccgctacaaatgggctttcaatcacccccgccgttttgtacggaaggatggcaaccaagacgaacatagcgagcacaaagaaaaacagcgtgcgccaaatgacatttcgaatggactttggcagtgttttttccgggctttcactttcccctgccgcaatgccgacaagctccgttccctggaacgagaagttcaccatgaccagcgtaaacataacggccagcaccccattagggaaaagtcctctatcagtcataaagttagacaaaaagggtgtctcctgtccgcctttaaagtcaatcaagccaaacacagcggctccgccaatcacaataaataatatgatcgccgccactttgatgcttgaaaaccaaaattccatttctgcaaagcttctgacagagagcgcattaatcaaaaagatgacgatgccgaacacgaggcaccatatccagatcggaacggagggcagccacctttgcatcaaaatgcctgctgacgtcagctctaaccccactgtattcgcccagctgaaccaatacagccagccaatcataaagcctgtcgacggtcccagaaatttagtggcgtaggcctgaaacgatccggccaccggcatggcaacagccaattctcctaaacaaagcatgacgagatacattaaaaatccgccgatgatataagcggcaatggcgccgagcggtcccgcctggctaatggtaaagccagagcctagaaacagcccagtgccaatcacccctcccaaagcaatcataaacaaatgcctgcttttcatgctgcgctgcaattcatttttatgattctgcatcatccttccccctttggttcttttgccgtgatggtcatccggtagctttgcaaaagatgaacggtggtttgctgtatgaggagaggcaatacatgaaatgtgtacggtttatagactcgttctgtccatttatggccgtcttttccgtacacgcccatattaatggatggaatattcagcttgcgtatgtctttgaacggaatggtcccaatcatattccacccagggaagttcctgataaaagaatcaatttcgccatcggtttcgtgcagtgataaaaaactgccgtctgccaagtaggggaaaaactttttgaagacaaatgtttcgcctgtcgattcagcggttttgtcagccgcttcttttatcacatgctgcaaaagctgatctcttgcgctatcttctttcaaatagttatgcggcaggtaaggaggtgcgtaaaatagaatgacttttgcgccttgatcggggtcaagcttttgaagctcttcgattgcctgaaagcatctcatgcgaagttcaaggtgctcgttggctttgaatgtctgctcgatacactgctcgggatctatcccccggtttctcagcttttctaagtattgctccaggctatacacttgaatgtcccatgataaatgtttctttggcaggttggctctttttgcatattcttcataataatctgataatttttgttctgtctctcggcatgcttcctcagtgacttcaataagcaaatccatcatttcttttgctgttctttcataaataaaacaattgaagtacaagctggtgctgacagccgtttgcacattataggattccttgttatcacgctgatacaaacaggatgggggcagaaccaactccccttcaaccttttctgccagatggatgttattgtggagacggcttgtgatttcagatgaaatgaaatttgggtcaattcctgccagtgtatcgccaacatggacttcacgcccgtaaatgtaaaagcaaggcaacagttttcccgcggctccggtatagatatatcttgtctgatcaccatcgtaaagcggggtaataaaatccgtattaatagcagccaaatagtgaagctgtttttctttttttagccggttcagctctgaaatgctggcaagaatgcccgaatgctggctctcctcatcgggattggccataaacaatacatttcccggcaacgtctcaaggttctccgaaaaatgcaggagattggctaaatgcacggcgatgccgctttgcatatcaacagatcctcttccgaacatccaatcgcctgatttggcatcccgctgaacatcctgatcgaactcatagcggctgaaatactcggccaatttctcacaatcaaaagcgatatcctttaaagggccgaaatcttcaattccaactgtatccagatgggcatggtaaatgactgtatttcggctttctccatgtcctttaataaacgcaaaaatatttttgcgattgtatgggtcattgggaatggcctgttcccacacatgactggggttttcctgaaaataaggatagctcgtgatcacttctttgatgaaatctgcttttgtcccttctccaacggtgccgttcacgctgctgaggctgaccagagatgctgtcagcgcctccactctttcagccggattcatgtgactgatttttgtatactgcataaattgtcctcctgattaaaaagttgaaatcgtgcgatccgctaaagaatcgcacgattttatttctctcaaatcaaaaagcttcggacgttgttttggcttgcatatgaagaattaagtaatcgggaccgcctgcttttgagtctgttccggacatattaaaaccgccgaacggctgatagccgacaattgctccggtacatcctctgttaaaatataggtttccgacatggaaatcctcacgcgcccgttcaatgtgcgcacggtttttcgtcagaagcgcacctgttaatccgtattccgtgttattggcaatctccagcatatgatcgaaatcacgcgctttgcaaatcgcaacaaccgggccgaaaatttcttcctgcatcaagcgggcgttttcatcaacatctgcaaagatcgtcggctgaataaagtagccttttgaatcatcgccttctccgccggccaatagcttgccttcagatttgccgatttcaatgtatttcatcactttgttgtaggatgcttcatgaatcacgggacccatatacgtatcaggatcttctggattgccgacagtcagcgttttggtcagcgccacagctttttccaccacttcatcataaacatcctgatgaatgaccgcgcgggagccagcagaacacttttgtcctgaatatccaaatgctgagtacacgatagaggatgcagcaaggtcaagatcagcgtccttgtcgacaagcactgtgtcttttccgcccatttctgcaattacccgtttgagccatttttggcccggctgcactttggcggctcgctcataaatccggcagccgactgcacgggaacctgtaaatgagacaaaccgtgttttcggatgctcaactaagaaatcaccgatctccgctccatctcccggaatgtaattcagaacgccgtttggcagacccgcttcctccatgacctcgacaaattttgctgccactaccggggctgcgtcagccggttttaagagaatcgtatttcctgtcacaatcgctgccgccgctgttcccgccataatcgcaagcgggaagttaaatggagaaatgacgatgccgacgccaagcgcttcgtaatgatattgattgaactcgccagcacggctcttcaccggagccccttccttgagctttaacatttggcgcgcgtagaactctaaaaagtctatcgcttcagccgtgtccgcatccgcttccttccacggttttcccgcttccttcacaagatagcttgaaaattcatgctttcttctgcgcaaaatagccgctgccttaaagagaatattcgcgcggtgctccggtctttgttttttccaggaatcaaatgcctgcaatgcggcttgcatcgctttttcagcaagctcttgatccgctgtagacgcgtacccaatgatctcttctttatttgccgggttaatggaaatgattttgcggtccgtttcaattttttctccatttatgacaagcggataatgcttgccgagctgagtgtttacaaaggccagtgactccccaaatgcagttttattctttgcttccgtaaaatcggtaaatggttcgtgtgcgtatgtgactgtcatatgtagtccccctcgtgttatgaaatatatcttcgcatatgaataaaaatgcaagaatcatgccattttcttgtcttttgctgaaaaaacttgttgaatcgaacagaaatttgtctaacaggtgatcatctttctctatttccgatcttgaacgcaaatttattttgcgatttttgctctttaggcaaaaaacaaatgcaaaattattttgcggaggcttctcaaattagacccatccgcggaatcgcgatgcttctgccgattttctgatgcccgtcatgtaagccgccaaacgcatatccactttatgtgttgccgctgtctgataaattgtttcgaacgagctgaccatgacgcttctcaatttttctgcaacctcttcttccgaccaataatatccttggttgttttgcacccattcaaaataagaaaccgtgacgccgccggcactcgccaggatatccggcacaagcagcacgcctctttcattcaggatcttagtggcatcaatggttgtcggtccgttcgccgcttcaacgacgattgacgcctgaatgttatgtgcgtttttggctgtgatttgattggagatcgcggcaggcactaaaatatcgcaatccttttcaagcagctcctcatttgtgatgacgtcagtaaataaattggtgaccataccgaagctgtcccgtttatcgagcaaataagggatatcaaggccgtctgggttgtagagcccgccattggcatcagaaatcccgatcaccttcgcgcccgcatcgtgcatgaatttggccaggaagctacccgcgtttccaaagccctgtatgatgatgcgcgcgttttgcagcttgatcccttttttcttcaccgcctcttcaatacaaatcgtgacgccctgtgccgtcgccgtttcccgtccttgcgatcctcccaaaacaagcggtttacctgtaataaagcccggagaatcgaattcccgcagccggctatactcatccatcatccacgccataatctgcgaattggtgtatacatctggagctggaatatcctttgtcggaccgacgatctggctgatggcacggacataccccctgctcagcctttccagttctccaaatgacattgtccgcggatcacaaataataccgcccttcccgccgccgtaaggaagattggcaatcccgcatttgagcgtcatccaaatggataatgcctttacttcctcttcattaacttctggatggaagcgaacgcccccctttgtcggaccgacagcatcattgtgctgtgaccggtagcctgtgaacactttgacgctcccattgtccattttgaccggaatgcggacagtgagcattctctgcggctctttcatgagttcatacatatctcccggataacccagcttccgaagggcttccttaatgattgtttgggtagacagaaataagttaagagcttctttttcttcatctttcgagacttgctttgctgacatctttttcacctcattgtttttttggccggctgtaatgtaaacgctttaaaaaatcagcccgccaattcctttctgcattggattcacccttatcatcatgcaagatccgtaccagcttttgaatccacaaaaaaagagactgaaaacatctcagtctctgactacaaatctatcgattaacggggatcaatcaccagctgcgtttcagcataaaaactgccgattcccaaaccgtttactacatcgcctttaatcgtgtaagtgcctgcgcgaggaagagttttacgcaccatgacaaggtcaaattcggatgcgcctaacaaatcaagcgtaagcggaagtctgactgtttttccatcgtttaaaatctgtgtttctttcagtgttcttccattcactgaatctcttgtcgtagcatgaaacccgtcaggaaattgaaattctaccgctccaagagaaagcaccgcatttggtttatatgtcacttcaatatcagaagtggtccactctttcgtgctgttaactgtttttgcctcgattgatgcagactgtgcatgagcttggcccgaaggaagtaagattgatagtaaaacagctgaactgatgaataatgaagatacgaatgaagttctttttagcatgacatttccccctaattgattgttgaaatttggccagagcgtcctctgcagaaaaagcgctttttcataattcgcgaattaccagttctttttcttaaaaattaatctatcatcattttccatggaagtaaatgttttttaaggaatattaacacttggaattcaatgagaattccttcctgtttatacaaggttcaaatggacgattctcctctctttttctagtaaaatctgcctgacattttatatcttttatcctattttaaaaaagggcaaaaaaagtcgaagatgcctctgctcttcgattgatcacgttcctatttttatctgaattcagtgttccagttaaaaccgatcgtctcatcatcccacggaattcttttttcatcaggctgatccgggttatacgacatggtggtaaaatagataattgtcagcggcgtctctcccagcactctatatccgtgagccaccccttttgggattaataacagcatcgggttgtcttcgcccatataatagacgtccgtttctccttttgtctttgaatcctctcgaagatcgtataggacaacctgagcgtggccggttgggaagaaccagagatcatcctgcttctcatgataatgaaatgccttaatcacacccggatagcttttcgaccaagaggcctgcccaaaatgctcaaggaggttctcatcgtcccggaccagctcagcaaaaaagcctctgtcatcgctatgcttcatcaattttttcaccttgactccatcaatcacacgcactgctcctttcctgcaaatactctcgtaacgcttcccgccagtggcgggggcggatgtcggcttcttcaatagcccgatggctcagcacagagtatgccggacggggcgttttgttcccgtattcctctgtcgttacaggcaaaatggctgtttccagcccgctttcttccataattgccgtcgcaaactcataccagctgcatatgcctgaattgctgacatgatagatgcccggcggatggctgaacagtttgatgaccgcttctgctaaatccttcgtataagtcggcgaaccaatttgatcgctgacaacccgaagctcttgtttcgtttcagcaagcttcagcatggtttcaacgaaattactgccgccatgtccgtacacccacgatgttctgatgatcgtgctgtcttttgtcgttaatcgtatcagttcttctccgagccttttgcttttgccataaatggttttcggatcgaggggatcatcttccctatatggctgggttcctttcccattgaatacatagtccgtgctgatatgaacatattgagctccgatgcgggttgactcaagcgctgtataataagcgccgattccgttaatcaagtacgctttatcaagctctttctcgcattgatcaaccgacgtaaacgcggcgctattgaccacgatatccggctgataatggccaaacgaatgccgtactgagcgctggtcagcaatgttcatcatcttctttgttaacgcaatgacctcatatccggcttgcttcagctggcggcatagttccaagccaagctgtcctcccgccccagtcaccaatacctttgtcaatcagatcaccttctcatcggtcattgtctgtataccactgaatcgtacgcgcaatgccttcttcaaacgtcacttcctgccgccagcccagttcatttttcagcttagatgcattgatcgcatagcgccggtcatgcccttttcggtcttccacgtgggcgaacaattcctcacagcccagatgcttcaaaatggcactcgccagctctttattcgtgcgttcatttccgccgccgatgttatacacctcgccgtcggtccctttttctaaaatcagcttgatcgcgcggcaatgatcctccgcaaacagccagtctcggatctggagtccatcgccatacagcggaacaggcaggccctgcttcgcatgacggataatcgtcggaatcattttttcgctgtgctgataaggtccgtaattgttgctgcatcgtgtaatgatggccggaagcttgtgggttttcacataagacaacacgagcaaatcagagcttgctttgctggctgagtatgggttattaggagaaagcggcgtcgtttctgtaaacgcgggatcatccgcttttaaatccccgtatacctcatctgttgaaatatgaatcagcttcttggcttttcctttcaagaccgcttccgccaatcggtatgtccccatgacatttgtggtgataaacggctctgcttgggaaatgcttctgtccacatgcgattctgctgcgaagtgaatgacgccatcgtaggtctcatcaaacgcgcggtcgatatcctcctgaacgctgatgtccccttttacaaagcgaaaacggctgttttgctttaatttttccatttcctccgggtggctggcgtacgtcagtttatctaaaacggtaatgcgcgcatccgtttccctcagcatgagctttgtaaacgtgagcccgatgaagccggcaccgcctgtaattaaatatgattttgccatcacttttcgtcctgtcctttccgtaaagcctggtgtacaagctgggaagcgagataaagcgattcgtgagttccggcatctacccaccagcctgataacacatcatacgtaagctggctgttttcgatgtatagattattcacatcggtgatttccagctcgccgcgctttgatggtgatatttgttcaatatatgaaaacacctctgcatcatacatataaataccggtaacacaaaggttggtcggtggctgttcgggcttttcgatgatggaacgaatccgcttgtttttctcatcaatctcagcaatcccgaagcgttccgggtcatcaacttctttcagaagcacttttgctcctttcccctgctgttcaaagcgttctgtataaggctttaatgaatcttcaaatatattatcacctaataataaaatgaaagactcttttttcgtaaagcgctttgcataagacagcccatccgaaatgcccgatgctgccggctgtacttgataagtgatagtaacgccaagctcttccccgttcccaagcagtttgtaaaattgcggcatatgctccttttggctgatgagtaaaatgtcttttattccggcttcctccagcttcataatcgaccagtatatcatcggatacgggcctacaggaagcaaatgcttgttgacggctttcgttaagggcataaggcgtgagccgtttcctccggctaaaataacacctttcacattaacacttccttacatgcatttttatatctcttgttcatataaatcttgaagaatagctgttacccgtataatgcctttgccatccacgagcggccttcctcccttgtgcaaagaaaggcgaagaggatagctgctcataatgcgtgacatctgatagatgagtgtttcatccggtacaagctcacccaagccaagatcaagagcggcgccttggtcagcaaatgttttggctgttgccgtttgatgcccaacctgagaaagaacaaggcacggcacgccgatgcaaatggcttcatatagagagatgccgccggcgacaatggctgcgtccgcttgtttcatcaaacccgccatatcatttgtctgttcgatcaccttgtactgcggcttcttttcgatccgccttcggactgcctcttgatgcggtgaagcgctccccatcacaaaaatcatgtttttgtcttttatgccggggacttgatcagcggcagccagcactttaaaaataagctgcttcggatcacttcctcctaatgcaacaaggatattgcggcagtctttcttaagtgtgtaatcctctcttgcggcctgaaaggcggggtgaagaataagatagtccggaccttcataaatgcgtgtgtttccctgaacgtacaccctgcttctgatgtcaccgtaaattccgttaatgactgcgtcactatattgaattgatttaccgtttttctcttcaaaaagaacaattttcgcatctgtctccgtctttattttctttaacagctctgcaggcgcgcctagaatatcaaacaaaagcaaatcaagcttcttgctttttatttcccggagaataaattcgtgctgctgcagctccggctttacgatgacacgccaatgctcttcatgaagaaacgcttcagactcctgattcgtataaaacgtaatcaaacatcgctgtttgagcccctccgcaagtctcttcatccggacaacatggcccattcccttttcatagccgccgtctgcgaagatcccaacacgcatggctattcagcctctcgttcgattgccgcatcggggttccggttcagaagggtgataagctctgaggcggatacaccagggcgctcgcctgctttttgatagagggcctttatcgattcatagtcttcctttgtatcaatggtcagccgatattgaggggcgcgaaatcgttccggcgcctctaaaaactgaacacgataaagagctggatgattccttatatataacgtgacatgctcctgatattgatcctccatattctgaatacggctgatgtcaattaataggttggcgttgaccacttcgccgcaaatccctaatggggcattcaggatatacgtataatccgatccttgatcaaaatgcgccttaatcattacatcgagcagctccggatcgacaaacggattatcacccgttaaccggatgatgactgacggtttaacagcttctatgaccttcacaaacctatcgaggacacgttcttcgctcccgcggaaaacacgaaagccttgtttgatacagtgcgcctctaatatgtcgtcagtttctttgtcagacgtggcgatgacaagattatcccgatccttttggtaaaacgcgcttttccggacacggtgaacgagaatgtcaagtaaacgattcgatccgagcggccgaagcacttttcccggaagccttgttgaacccattcttgcttgaatgataaagagaatatcattcatgaaacgggctgtccttcagtaaaatgtcatcccagacaatgcctgtgtcggctggaatgtctcttacagcccgaacaccgctggtcagcagttcaaaaaatctcgggtgcagcccctgcggcttttgtccgggccgaagcactgcgatattgtcttcactaaaggcttcacctttttgaatcggagctgttgtaaaaatgcctctgtatgcaaaatttctgatttctccttcgatggaggttgttgttttgtatgaactgccaagcagtttttcagagaccggctttgtgatcccctgtttcagctcagcttccgttttcctgatgccatcgaccatttctttcaattcatccggatttaatgcaaacgagtggtcggcacccggcagatctttatcgatcgtaaaatgcttttctatcagttttgctccgagccgaaccgcggcacacggcgcttctgtcggatgctcgctatgatcggagaagccgattactgcctcaggaaaagcggcggcaagcatcggaatgacgctgaggttgctgtactccggcggtgctgggtatttcgccacacaatgcattatggcaatttgattgtttccctctgccctgatggtgcgccaagcttcgtgaacatcagagatttcagctccggctgtcgagaaaatcatcggcctgttcagccgggcgacatatttgagcagcgggagatggttaatttcataggatgcgattttaaaagcgctcggcgaggtagactgaagcagatcagctgacccctcgtcacataccgtacttaaaaagatcacctgcttttcgcggcagtaatccaatagcggtaaaatccactcagcgggcatttccatagattgaaccaaagaaaaaatagagacgtccttgcccgctgccgtcttgtacaaaccaggatctttctggtacatcctatcagcttggaacatttgaaatttcacggcatccgctcccgcttccgccgcggcgtctatcagcgcaaaagcctgatcaagcttcccgtcatgattaatccccgcctcagcaataataaaaacaggagcgtctttgcctacagttttattcgcgatctgaaacgctgccattatttcgcctccttgcccggccaaatatgataatagtaatacgattgttcagcggtgaagcccattcgttcataaaggcggatcgcccttacattgtgaagctgcgtccccgctgttaccgttctatgcttctgggtctccggttgttctatgagattcgccaataaatgaaatgcaatacgttttccttcaaatcccggctttacagccatcaaatcgagaatgcattcatcatctcttgataagccctgaagatagccgatgacctcgccattgtgtttagcgacaatattgaccgccgcccttccattcagattgtttcgtgtccactcctgaaatattttgtttgctgcatcgcggctgagatgaggatcctgaaaatatctgctttttgtaaacgagtctcgggccagctcacatatcgcttctgtgtccccgggctcaggcgggcccagttcaaaaaatggcggtgttttgtcataaaaagacggaggcatcgccagcttcagcaaactcccgacaaagtaagaggatggctgctgctgtatcacatgcgcggctccgatatcttcagccggaacgcggacaaagataaaatccgtttcatccatttggcgtacagtataaaaagcttcaaacagcctctttagctgcccggtactatttgccgcaagaagtttgacgttgatgactttcttctgaagcaccttgctttcccacaaagaatcttcgtaaagcaatacgccttggagcctgctgttttcaaaaaggccgagggaaaattgatacggaacatccagtgtaagctttctgctttggagaaattcctcaattgcctctttggagacattttcttttaccgtatacacttaatcagccccttttacgatatcccgcacagcttcaatgacatcatctacatcgtcgtcagacattgatggatagagcgggagagaaagggttcgtttatagtaattcatggcattcggaaagtccgcttccttatatccaaattgcttttgataatacggatgaatgtgtactggaataaaatgaacgctagtgccgatattgtatttatcctttaaagccgtaatcatttcgctgcgcgtaaccccggcttttttttcatcaacttgcagaacatatagatgccaggcgtgcctgccgtcatcatggacaaacggcgtgatcagcccaggaatctgctgaaaagcggtttgatagcggccggcaatctcttctctccgtttctgcatatcatccagccgtttcagctgatgaagtccgagggccgcctgcaaatcaaacatattcatcttatagccgggcgattcgacttcatagtaccagctgccatttgaagaataacggttccatgcggctttactcatgccgtgaaggcttagcacccggatcttatcggcaagctcctcatcatcagtcgtcagcatgccgccttcccctgtcgcgaggtttttggtggcgtaaaagctgaatgccgttgcatccccgatagaaccgatcattctttgcttataagtcgtatataccgcatgtgccgcatcctccagcacgaataaaccatgattttgggcaacagccaatattgcatccatatcgcaggactgcccgccaaagtggacgggcacaactgctttcgttcgcggtgtgacggccgcctcaagctttaccgggtcaatattgagcgtgttttcgtcaatatccgcaaacacaggcgtcgctcccgtatgaataatcgtattggcggtcgagctgaacgtaagcggagaggtaatgacctcgtccccgggcccgatcccttttgctttcaaagccaaaaataaagctgcggtacatgaattcaccgccacggcgtgcttcgccccgacaaacgcggcaaactctttttcaaactgctgaaccttcgggcctttagaaagccatcccgattcaagcgtttctgtaacctcctgaatttcttccttaccgattaacggcaatgagtaagggagaaaatgatttctcttttgcaccatttctttgcgctcctatcattttattcagtatcttcccgcctgtaatcaacccctgttttggctttcagttccgcaaataaagcatttgttgattctgccaccggataattagccgctatgaatgccaggcgcgcctcttctgctttttgatgcacgtcgggacttcgaagaacttcaaccaaggtgtgcaccagttcatccggctggtcaaacataaaatcgccaagagactcataatacggatacgagcgatttccggacgattttccgatcagcacaggcttttgaaacagcatggcttcaagaccgactgtcgaggtctgcgtcactgcggcatcagcatacggcagcaaatcataaagctccagctcctttttgatgactctgcatgctttatgttttttcgccgcctcgtgatacagatcaagcttgttttttccgatttcccacgggtggggtttgataatgatctgcagctgcttctgatcagaaagcccctgcagcacaccggaataaaagtcttctgaaaagggctgagtggcaatgagcacaatttttttagtcggctgaaaagcaagttttcgatagaatatggacatatccataggcgttctgttaaaaatctgatcgaagcggggatgtcccgttacgagaatctgctcgggtttacagccttttcgtatgaaccactctgcttcatacgcaccaaaaacagcttgataggttgtaaaaacaggaatgaaggcttcatctcccatcaatgcgccatgctgaagacaaatgctgacggccccttttctttgacacatgagagcgagcaccctgctgtaaatgtcttctgccgttccgacaataacagctgaaatcttttcctgttcaaacagcgcatcaactgtatcaatggcctctataaataaaggaatatctttgaaaagccggtcgcgaaacgcttgatcaccaaatgccgggtgatcatcataaggggcgagaagcgaacaggctgtttcgagatactgcttcgaatcgcctttttggcatgaatccgcaatctcccgcttgctaattacaggcagatcacaataatgcggcaaactccatctggccaaaacagccgttttttcaggatcaaattgatagtaatttccgtttgaaaaacgcaggtaatcaaagtgcaaaatgactttccctttaacaggtttgtcatttgttttaacgattttttggattctttcttcaaaaaacggctgaatctgtccctcatcgatatgctgatccaccgatccgaataattccggttcttcttccatcatcaccctcagctcagggctgatgtattgataaaaattactgataagcccaagcggaatccctttgtagcgaagtttgtcaaaaagctccacgtacttccggtacagcacccaataattgcttaaataggccgacaagctctcaccccattccaagcttttttaatgattcacgcagctctcggcaatttcgctgcggaggaaggttcctgacaaattcatttttttctgattcaaacagctgaaagtgaatcgattggtcggtaatataattcaggtccagctcctcatccagtgggtaaaacggataaaaatgattgactctccaaaagaaccgcgcatctcctatacggtaaaacgccgggctttcatcccaataggagccaaacttctcctttaccttctcaagcaccgaatacctgtgcatcaccgagcaatgatcaattgcgcacggtgcgttccatgtcacttgagcggcaggcctgacagtttcttttacaatgtcgcgattctcgtttaaatgataggttttggaggctgagtaaatcacagccttttcaggatgggtatcgagctcccgcaccattttcaggaggcggtccggcatatagatgttgtcatccgtcgcataggtgatatattcaccctccgccatctcaatcgcctgattgatcagtgccgcgtatctcgttttttctgttctttccttcactccagatatatcgctttgataaaaacgcactcggttatcattcaaaaaaggacggattacattcagcgtctcttcattggagttgtcatccataataaacaattcaaaatctgaaaatgtttgtgagagtatgctagaaatggactttgccacataatcgcttttgttatagctcgtcataatgactgatactttaggcaaatcctacacctccttcttggaacttcacacctgaaactatcgttatcttatgttgcttatgctcaagttgcgctagggatacaaaccaatatgcgaaaagtttgtgtatgtctctgaaaaacagcggctgcccagagcgaaatctgatcggtccgctgttctttttcagcataatccaagcatcagcctcataaggtgaaagagataaaaatcgcaccagcgactaagatcgttttccatcggaggtgagtcatcgcggagcgttcacctatacatccagaacatgttttgaatggttttcataaaaaggaggaacgatatgaaaccgaaaaaaaatcaatatcagcaaatgcaggcatttgataatatgcaggggtatcagcctcagtttggcgccaacccgtacccgcagcaaggccaaggctcacaaatgcagccaatggggatgcagccaatgatgccaatgcagcagggacagcaaggacaacaaggacagcagggatttggattcccgggccagcagcagggcggcggttttcaaattccatcggggcctacaccgtcaggaccgggccaaagcgttcccggcatgctgcctgttgaggaatcttacatcgagaatattttgcgcctgaatcggggaaaaacggccaccatttatatgacatttgaaaacagcaaggaatggggctcgaagatttttcgcggcgtcatcgaagctgcgggccgggatcacattattatcagcgacccgaaatcaggaacacgctacctgctcctgacaatctacctcgattacattacatttgatgaagaaattgcttatacgtatccatattccatggcgtcctattcgccaagataagaaaaaagccaatcactcatatgatgaggattggcttttttgattatagatatttgacggctgcgacaacgatcataatccaagaaataataaacgccacaccgccgagcggggtgatcgctccaagaatggagatttgcgtcacacttagaatatataagcttccggaaaacagcacaattcccgcaaacatcagccagccggctgtcgtgacactgcctatgccggataatttatcagccagaaacgcgacaacgaataacccaagggcgtgatacatatgatactgcacgcctgtgtgccaaacctgaagatatttatcaggtattttcccttctaatccgtgagcgccgaatgctccgagtcccacggcaagcagggcgttaatagcccctaatatgataaaaactttcatctatctctcccgccttttcgttaaactcatatcatttatcttatcgcacctgcaccaaaattcaatgtttgttctccgttgacacgagattgtcggattttctcctgcgccaaagctggaactggtcagctgctattgcagcaagcgtccctaatacgagcccgttgcttaatagagaaataaataccggatgcaatccctttaacgcagtttcaggaacaaacatgataccgacccctgtcagcagtgagatgccgatgatagacctcaccctttttgattcttctttctcatacgaatcaaattcggcaaaggccagaccgcccattgcggagaacacaacaaaattcaccgcaaatccaacgggtgacggcaggctcgcaaacgtattcataaaaaacgggatcacgctgattacgataaccagaatactgccgagtataaacggttttttagaaggcatcttggtcgtttcaataaaacctgcggctcccgaaatcggaacaggcgcaatagctcccgtcaaaccgctaagcagatggctgaatgaagctgcaaaaccggcatggcgttcatgatgctttccatcaggctgtttgctgaattttttcacggcgatgtccacgaccttcatgctcgccagcatattcacgatcagcaagatggtaataaaaatagaagtgatgatcaggccgctgttaaataacggtggcccaaaaggaaacagggaaggcagctgaaacagccggtccggcatttcaatcggctttgccgctccggcagccgcaaacagcacccacccgccgaacaaggctaataaaatagaatattgcttaaaaaacacgatgttcgaatttgtcattataaaggcggcagcgatcacaacaagcgccaggccaaatacaagaccgtccaccccgtcctgtcgataaccgattccgagaattccttttataatgggctgactcagctgcatgacaagaagcaataaatagacgcccgttacaaccggagtaaacaattttgcaagtctgtcaatgaccttgaaaacacttaacaaaaagaaacatacagcgcttacaagaagagctccctgcaacccccgcagtgtgtctccatatgtcgcaaacacagttcccgttagccctgcgtagatcgtatacactccccaccacaagccggctgggctttcattgatcggcagtctgtggcctttcaaacactgaatgacggcggcaatccccagtacaaaaaaagtgctttgaatcaatctcgcagaatctgagtgatccagatgaaacgactgggcaaccgccaccggaacaactatcgccgcagcaatgataaacgctgtccattgcaacgcgccaagaaccaatttcacgtaagctcaacctctctctttaaaaatcaaataaagactctccgtttccatcctcttcctgcttctctttttcttgctttcgatatttgtttaatcccgcgctccccatcattttttccatcatcagctggtctgtcgatggcggcgcggcaggacttggcgtaacgctcggctgtatgcggggcgcgctcgcgttctccggctgatcaagcacgacatcacacagagaacggacaaccgctacataacgcttcagctcctcatcccgttcagctgtttttgcttttttcagctcctcttccatcttttgaattaatgcagatatatgaatgttcatgaagcaccctccaaaaaaataaatgttgtcttcctgcattttatcaaattcctgctgtaaacgcagatatgagtttgttattttttctgacaaaccttgcgcgattgacaagcagaagagatttttcacataataaatcaccatacattacaaaaaggagaaacggaatgaacagcatcccctctatcatcagcaagcataaagcctattttgcggcgggacatacgagaccgcttgaatcgagactgaacattttgcgaaagctgaaacaagccgtcagaactcatgaagccgatctcatagccgctctctaccaggatctccacaaatccgagcaagaagcatactcaacagaaatcggaatcgtcttggaggaaatcagctttgtcatgaaacggctgaaaaaatggtccaagccgaaacgagtcaaaacgccgctgactcatctaggctccaaaagcatcatcattcctgagccgtatggaaccgttttggtgattgcaccttggaactatcccttgcagctggcgctttctccgttgattggagccattgcggcggggaacacggtcgttctcaagccatcagaatatacgccggctgtttctgctattctttccaaactcatcagcagcgtttttccgaccgattatgtcgctatggcagaaggcgggcccgatgtcagcacagcattattacagcagccctttgactacattttctttaccggcagcgtagccgtgggaaaagtcgtcatggaggccgccgccaaacaattaattcccgtaaccttggagctcggcggcaaaagcccctgcatcgtccataaagatgctgacattcagcttgccgccaaacgcatcgtcttcgggaaatttacaaatgcgggacaaacctgcatcgcaccggattatttatttgtccacgaggacatcaaaacgaagctcacagaagaaatgaaccgtgcgatcagagaattttacggccctcagccggaacggaatccgcagtacggcaaaatcgtcagtgaacggcactatcagcggctgctcagctttctgaatgacggcatcccactcacaggcggacaatctgatcccaatcatcacaaaattgcgccgaccattctcgaacaagtgagagatgactctccagtgatgcaggaggagattttcgggccgattcttccgctctttacataccgcaatatcggggaagtcattgagaaagtccaatcgcgccctaagccgctcgccctgtatctcttcaccacaaacaaagaaattgagcgcgctgttttaggaaatctgtcgtttggcgggggctgtgtcaatgatacgttaatgcatgttgcgacgccgtatttgccattcggcggcgtcggggaaagcggcatcggcagctatcacgggtttgacagttttaacacattcacgcacaaaaaaagcgtcgtcaaacaaacgaaccgtttcgacttcgcatttcgttatccttcctccaaaaacgggctgcgaatgattcgaaaaatactcaaataaaaaagcgcagataacctgcgctttttacaaatccttaatacaccaatcaatcggcgcctctcccattttctccaaataggcattcgcccgggaaaacggtctgctcccgaaaaatccgtttctcgcagaaaacgggctgggatgcgtcgattcaatgataaaatgcttggacgtgtcgatccgttcttttttcatttgggcatgccgtccccacaaaataaaaataaccggccgctccctttcattcagcacgtcgataatccggtctgtcagtcgctcccagcctttccccttatgggaattcgcctgtccgcgccttactgtcagcacagtattcagcaaaagaacgccttgctttgcccagctcactagcgatccgtgatttgggatgctgcacccgatgtcctgctgcagctcaagaaagatattttttaacgaaggcggctgctttacaccgggcttgacagagaagcttaaaccttgagcctgtcccggcccgtgatacggatcttgacccaaaatgacgaccttgacatcatcatatgatgtataatgcagcgcgttgaaaatatcccggctgtccggataaatcgtttgctccgcgtattccctcttcagcatctctctgagctcttgataatacggtttctcaaactcttcctttagctgattccaccagctgtcttgtaaaagctgtttcaagattcaggcctccttacgaacgatgaagtctggaatagacaggctcgccatcccaaaccatttcactttttgcttcccgcctcttcatctcaggctcttcaagcaggacggcaaagtttttcgtcggcagctccccgagtccgtgcttttcacttaaacgatccaaatattgcttccgcttggcgccaaggtccgcagactgattgtctcccacgtcactgaaggcataaatcacactggcgcaagggacacgcttcacccggtaatccttggctgcgcgcagataaaaatcccaatcccagtaattgtgcacatcagcatcgaaatacccgatttcatcatgcagaaaacgtctgtacatgctgcccgacggcacgtatgtagaaaacactctcatatcctcatagtcagcggtataagcaaacaatttccgtgacactggataccttgttccgtttttctcttcaaacgaaactatttccgcatcagaatgaacgaagtctgccgtttctatttcctttgccattttctcgatatgccctggcgtaaagaaatcatcgtcatcacacagcataatgcaatccccagacgcctcttttacaccggcatttctcgcagccacatgccccgagttcttttctaaattgatgacagcaatcggtagctccggatacagtgctttgaccggcacgaccgattccccggcatcattcacaataataatttcatacggcttcaaggtctggcgggaaatcgactccaaaagctcacacaaagccggaatccgattataggtcacaattacgatagaaatcttcatgatgctctccttctcattttcatagtcatgtactattaaaacatatattggacgggagatcagtgggaatatcctactgaaacggcatactacaatgatagaaacagcaaagtggctccgatcagaagcaccatgatcagcatcagatctccaaagacatgaaagaaatctttcatgcggacgccattcggaaggataagacgccacagcttagattgatagaccggcagcagcaccagtgcataagaaagacacaaaaatgtaaaagccggcggcacaaaagcacagcctgcatcgtcccaattcatcatgatgtctttcatactagatccatccaataaaaacaaagatatcatgagggctagcaacacaaaggaccccaattgaacctcaaacaggcgcattttctggttatatgcaaatcggaccgcccaaaaccagacataagcatatgaacatagcagcgtaagaatggcacctgctgtaaagacgacatcaggcagccgatcaagcagaaaaacaaaaggcaagctggctgccatagccaagagcatgcagccaccagtaaacaaaaatactgccccatgagctacaaaaccatataaacaagagctaatcctcacgacatacacctcctttacatagaaattctatgtatatacctaaaaaatcagacaagctgacgcctgccaatataacagcccattcggccaaataacggaaataacagcgttgcaaaagcacaagttccaacaaaccaaggtgtcaacaaggattgaaacagcgcagcaggaattacattgaatagaaaaacaagcataaaaatgacgtttggcaccattgagatcagaatcgtatgtagaacaagcttttctccgcgttttccaaactccttcacgccttgatacccaatcagcacccagtagatcatatatgcagctaagatcagccaaacagaaacagaaatgcctttccatactgcttgaacaaacggtgattcaagccatacatgcattattgtaatcgcaatgccgacagcgaatagggcactgttacagaaaagatggaacatcaaaaacgcacggaacgttactggctgtattttcttaaacgaagaaacaatgtcagttggtgttccaaacgcctgcaataaagtctgcatagcttcctcctcactctttccttcctgaaaagagcgaaacagatgatgttcaatatggctctcaatctcttctatcatcgcctcaccctcaggaagccctttaagcccgcttttgatttcggatacatatgtttctttatccattttgtccgctccacttcagtattcggtccatcatggctgaaaatacgctccattccttcgtgcgttccgccagcacttctttgccctcgtctgtaatccggtaatatttgcggtccggtcctttctcctgcttctcccagtaggaagaaatatacccttggcgttcaagcttgtgaagagaaggatacaaggtcccttctttcatctgcagttcatttccgctgcggcttcccatttcttttacaagctcatagccgtacatcggccgctcgttcagaagcgtcaataccaatataaccgtgcttcccttaaccagctcacgatttaacatctcaaaacccctacctagttttcttatgtagcattttacgaaagcccgttgagattgtcaaatgattcctatagatcttctatattgtgatacagagaaaatctaactataatgaaagacaaaacacgatggaggttcaagacatgtctatgcataaagcactcaccattgccggctcagattcaagcggcggtgctgggattcaagctgatttaaaaacatttcaagaaaaaaacgtatacgggatgaccgccttaacggtgatcgttgcgatggacccaaacaacagctgggaccatcaggtattcccgatcgatactgatacaatccgcgcccagcttgcaacaattacggacggcatcggcgtggacgccatgaaaacaggaatgctgccaaccgttgacattatcgagcttgcggcaaaaacgatcaaagaaaaacaattaaaaaatgtggtaattgaccctgttatggtttgcaaaggtgctaatgaagtcctttatccggagcacgcccaagccctgcgtgagcaattggctccgctagccactgtcattacgccaaacttgtttgaagccagccagctcagcggcatggatgaactaaaaacagttgacgatatgatcgaagccgcgaaaaaaattcacgcactcggcgctcaatatgtcgtcattacaggcggaggcaaactcaaacatgagaaagccgttgatgttctctatgacggagaaacagcggaagtccttgaaagcgaaatgatcgatacgccttatacacatggcgcaggctgtacgttctcagcagccgtgacagcggagcttgccaaaggtgcggaagtcaaagaagccatttacgcagcgaaagaattcatcacagcggccattaaagaatccttcccgctaaaccagtatgttggtcctacgaagcattctgcactgcgcctgaatcaacaatcataaacaaaaggggctgcctaacaaagaggcagccctttttaaatcaccgaagacttttcacagaaaaaactgccgatcccatcggcagcctgtttatttgatttttaaattgtttgcagatttcctcaaaaatgtttctatcgactgaacaaaaagtgcatattccttcatttgttcatatgcccgcgtgagaatttccgccgtttcactgtgcggcgttgttccgccaagcatttttttcagctgaagcagcacatccttatattcttcccgcttatcttcaacttggttagcagccttttccaaacattccggtgttatcttctgttcatttatattcaagaaaacaactccttttacagaaaaaaatagtaggttatcgttgaagaatagcacagatggctcagatttcacataagaaaatagaaggattttctacataagtgtccaaattctgacattcatttcagatttcccggtcgaactggctgttacttcatgatttcccgggaaaggaaaatatctcgcactaaagacctcttctccgttattgataaagatttcaacagaggatgcgtcgataaacatgtgcacggtatgcaaatccttgatgcggcaatgtctcgcttctgttctttttccgtcaaagccctttcgttccagcgtaacattccccttgtctttatggaaggaaaacgtagccgttccgcggatactgattgaaaagcctgactctgtatgaatgtcttccagcagaatctcagttctttcaggtttttccactggaagcgtaccagatgatccatgcatgttgatgtgtatttttttctcatttctgcgcatggcttttagctcaggcagcggctgctgaatcagcttctcgcctgatattgtcagctgtctcggcagcgtcatgcagtgaatccagtgatagtcaatcgtcggatgagatccttcatcctggtcaggcacagccatccatgcaaacaaaattcgtctgccctgatcatcttcaagtgtttgcggcgcgtaaaaatcaaaaccttgatcaagttccctaaaatcaccatgcttcagttcaggcttgttataatcgagacgcccgacaaaataacctgactgatatacgttctgataaaggaaaccgtcagcctcaagcccttgaggcgaaacaatcagcacgtccgatccttgaagggaaaacaaatcagggcattcccacatgtatccaaaatcgtccagcccgttgaagcccgcgccggttatcgggccaagaaatctccactcactcaggttatcagaagcaaacaatacagcctgccctttcaaattctctgtttgcgcaccaatcaccatataccatgtgccttcatgctcccataccttcggatcgcgaaaatgcgccgtatatccttccggaaggcgggcgacaacaccctttttctcaaaggacagcccgtcgtcagaaacagcaaggcattgatacgtttcccgatttccatcctgatccctgacatttcctgtgtaaaacagatagagccgatcgtctttcgtgacagcgctgcccgagtagcagccgtttttatcaaaccaatcactcggagccagcgcaatctcttcccgcttccaattcacaacatcctgtgtcgtataatgcccccaaaattttgcgccgtgccccgtctgaaacggctgccactgaaagaatacatgatagctgcccttccaataaatcacgccattcgggtcattcagcagcccaaccggcggcatgatatgaaaatgctggcggtgcggatcgctgttagcgatgggctcttttttctccacttcttcataagcccggcgacgaagctcctggtcatgtgctgtcattttttcctctcctcatcctcattaatcttcatgacaaatgctgcaatgaacgctgacactgctgcaatcgccatgccaatcagatagtgaatcaagttgctgacgccaaacggagccgcaatggcgatcatcggaattcccgttaacccgtaagcgtttgcagctacatgtgtaaagacgacatatgccccacccaatgcgcctccgatcatcgcggcgataaacggttttcggtagcgaagattgactccgaatatgacgggctcagtaatgccgagaaaagcggaaaatgctgccggaagcgcgatttcttttgtctttgcctttttcgccataaagaagacggcaaggcctgccccgccctgtgcgacattcgccattgaccagataggcagcaagtagtttttgcctatatctgcaattaaccccgcctcaatcgcatggaagctgtgatgaacacctgtcagcacgatgagtgaatacgtgcccccgaaaatcaaacctgcaacaaaaccggcatggtcatacacataagttaaagcaaccgtaatcccggagccaagggctcttcccagagggccaatcgcgataaaagcaacaaacccggtgacaattacagtaacaaaaggtgtaacaagcaagtctaccgcatgcggaaccacttttcttgtccatttctctaccttgctcattacataaaccgccagcagaacagggatgacagttccctgatagcctagaagcgcgatatcaaatccgaaaagatgcatataatcaggtgtggcttccgccaatccccatggatttaaaagagacggatgaatcatgattcccccgatgaccgctcccaagtatggattgctgccaaactcttttgaagcgctgaccccgattagaatcggcaagaaaatgaatgctgcacttgaaaacatatcaagcagctgcaaaagcgcagaatccttgctcatccaatgaaacgcattgatcatacccagcaatcccattaataggccgctggctacaatagccgggatgattggaacaaaaatattagaaagcgttttcgcaaatctcgcagcgggattcagcttttcttttgccgcatcctgatgatttacgtgttcttcacgctcgatatcagcttctttagaaaaggcatcgaatactttattcacaaggcctgttccgaaaatgatctggtactggccagagctgctgaaagcccctttgacgccatcaagctcttctacttgtgcttgatctatctttgattcatctttcatcactaaacgcagtcttgttgcacaatgagccgcgctgataatattttctttccctccgagaagctcaatgaggcgttttgcagtctctttgtaatccatctatttctcccccttttatttaaacaaaaaagacctaaaattcgccaacgaataaaggacacagcgatcctttttcatttacgcaaattttaggtcttgcctgctttaccagtcacaatcccgcttattcagattaagaatacgctttcatcataaatcatgacagcgttttcgtcaactatttttttagttaaatagtttgataaaacatgtagacaaaaattcgtaaaaattaattgtgaaatacttcacaatatcgtgctatactatgctcaatcatgaaagaaagcaggaaaagacaatggaaactcaagcattgcaaaaggttgaacagtatgctttgaaaaaacaaaacatattcgcttcaagcaaaatccgttatgtgcttcggtccattttggccagtatgtttattggttttggcattacagccgcaagcaaaacaggcagctatttctttatggctgattctccgtttgcctttccggcagccgctgtcactttcggggccgctattctgctgattgcttacggaggcggagatttatttaccggcaacaccttttatttcacctataccgcgctccggaaaaaactcagctggcgcaacaccctgtacttgtggatgtcaagctatgccggcaatttaatcggcgccattctgtttgccatcctgatcagcgcgacgggactttttgaggagccttctgttcattcctttttgattcatttggcagagcacaaaatggagccgccggcttccgaattgtttttcagaggaatgctgtgcaattggcttgtgtgcctcgcctttttcattccaatgtctctcaaaggggaaggagcaaagctttttaccatgatgcttttcgttttctgcttctttatttccggctttgaacacagcattgccaatatgtgcacattcgccatctcgcttttgatcgagcaccctgatacagtgacactgatgggagcagtcagaaacttaatccccgttacgctcggcaatctgaccgcgggaatagttatgatgggctggatgtactacacactgaatcctgatcaataaaaaaacttccagagatcactccctgcaagtcaaagcggttattccgagagatcttgaagacgctggacatgcagcgtgatatagccggcctcggattccggcaaatgtaattgatattcatttttcaaaaactccgccagctccagcgcacattgataggcgaatgaatactttttttggatgaaataaagcatctcctcgtccatacgatggagcgcttcatttgattccaaccggctgaccgcgtatcgcaaatgcgtgacaaggcgttgataggaaatgctgttttcatccacctttcgattaaagtattgttctattttctctatcatttctttgatcatggtcgtatgcttcagcgctgaatacatgctctccgcatccatcttcgccgtatggatgtgaagggcaatataacccgcttcatcttcaggcagagacacgcccaatgtctcttttacatgtccgatcgcccacaggccgatctcgtattcttttttatagagcgcctttatctcatgcagcaatttattctgcacaagcaacccattttgaatcctttcgatcgcaaaggacaaatggtcggaaagcgcgatatgaatgtgatcgctcagcggcgccgcgagctctccttccgcatagctgatgatatcctcagctatttctacatgctcctccggcagtgtttgcaggatttgtttgaacttttcattctcgtcgcgcacgacaaagattttttccactttattcatagggatgagatcatttttctttttttgaaaagcgattcccggccccatcacgattttttcctgatcatcctcttttattaaagccgcattgttgtttaatactttatagattttcaagaggttatctctcccgccaatttgcttttgactgggattttacctccttttgaccgccatgtaaagatgcgggcccgctctctcctgctttggcgattccttgaaggcttgcaaacatcttcttttataaagcgcggcggctttcgctttctgcttttcttcctcattcacagccatccgccactcataaaacgaaacgagtcctgcggcctgcacagccgcctttctttggtatgtacgctgagccgaatagaccgcggcagccgcagtttttctgtccggcgtcacccagttcatcaaaaagaccatccacacccgtaaagatacaagcaaacgtttcatagaaaaacatccctccgcttctttttggcaggcagcctttttagcagcccgttttctcagccgcagcccgcaagaaaagacggccgatttcttttctcgcaaactagcggctctagcaaaactcatgactctatgatagaccgtggaaagagaattctttgtcacaatatgagtgaaaaaaccaactagtttttagaagttttgttgaaagctgaaagaattgaaatgaaaattggagaaccgctttgaaaactttatacacaagttatcccaaagataagaacaacttaatcacaagagatatccacatgtccacaaactctatctatattttgtatacgaacgtatattcctaactatatatatacacaggtttattcacttatacacagggttctgtgtataactccttcgttatacacaaacaaactccaataaatggtccaaatgacacaaggatttttttgaattttcaagaaatatatactagatctttcacattttttctaaatacaaagggggaaacacattgaaaaaggggatcattcgctttctgcttgtaagtttcgtcttattttttgcgttatccacaggtattacgggcgtccaggcagctccggcttcttcaaaaacgtcggctgatctggaaaaagccgaggtattcggtgatatcgacatgacgacaagcaaaaaaacaaccgttatagtggaattaaaagaaaaatccttggcagaagcgaaggaagcgggagaaagccaatcgaaaagcaagctgaaaaccgctcgcaccaaagcaaaaaataaagcaatcaaagcggtgaaaaacggaaaagtaaaccgggaatatgagcaggtattctcaggcttctctatgaagcttccagctaatgagattccaaaacttctcgcggtaaaagacgttaaggcggtgtacccgaacgtcacatataaaacagacaatatgaaggataaagacgtcacaatctccgaagacgccgtatctccgcaaatggatgacagtgcgccttatatcggagcaaacgatgcatgggatttaggctacacaggaaaaggcattaaggtggcgattattgacactggggttgaatacaatcacccagatctgaagaaaaactttggacaatataaaggatacgattttgtggacaatgattacgatccaaaagaaacaccaaccggcgatccgaggggcgaggcaactgaccatggcacacacgtagccggaactgtggctgcaaacggaacaattaaaggcgtagcgcctgatgccacacttcttgcttatcgtgtgttagggcctggcggaagcggcacaacggaaaacgtcatcgcgggcgtggaacgtgcagtgcaggacggggcagatgtgatgaacctgtctctcggaaactctttaaacaacccggactgggcgacaagcacagcgcttgactgggccatgtcagaaggcgttgtcgctgttacctcaaacggcaacagcggaccgaacggctggacagtcggatcgccgggcacatcaagagaagcgatttctgtcggtgcgactcagctgccgctcaatgaatacgccgtcactttcggctcctattcttcagcaaaagtgatgggctataacaaagaggacgacgtcaaagcgctcaataacaaagaagttgagcttgtcgaagcgggaatcggcgaagaaaaggattttcaagggaaagacctgacaggcaaagtcgccgttgtcaaacgaggtagcattgcatttgtggataaagcggataacgctaaaaaagccggtgcaatcggcatggttgtgtataacaacctctctggagaaattgaagccaatgtgccaggcatgtctgtcccaacgattaagctttcattagaagacggcgaaaaactcgtcagcgccctgaaagctggtgagacaaaaacaacattcaagttgacggtctcaaaagcgctcggtgaacaagtggctgatttctcatcacgcggccctgttatggatacgtggatgattaagcctgatatttccgcgccaggggtcaatatcgtgagcacgatcccaacacacgatcctgaccatccatacggctacggatcaaaacaaggaacaagcatggcatcgcctcatattgccggagcggttgccgttattaaacaagccaagccaaagtggagcgttgaacagattaaaaccgccatcatgaataccgctgtcactttaaaggatagcgatggggaagtatatccgcataacgctcaaggcgcaggcagcgcaagaatcatgaacgcaatcaaagcagattcgctcgtctcacctggaagctattcatacggcacgttcttgaaggaaaacggaaacgaaacgaaaaaagaaacgtttacgattgaaaatcaatcttccattagaaaatcatacacactggaatactcatttaatggcagcggcatctccacatccggcacaagccgtgttgtgattccggcacatcaaaccgggaaagccactgcaaaagtaaaggtcaatacgaagaaaacaaaagctggcacctatgaaggaacggttatcgtcagagaaggcggaaaaacggtcgctaaggtacctacattgctgattgtgaaagagcccgattatccgagagtcacatctgtctctgtcagcgaagggtctgtacaaggtacctatcaaattgaaacctaccttcctgcgggagcggaagagctagcgttcctcgtctatgacagcaaccttgatttcgcaggccaagccggcatttataaaaaccaagataaaggttaccagtactttgactgggacggcacgattaatggcggaaccaaacttccggccggagagtattacttgctcgcatatgccggaaacaaaggcaagtcaagccaggttttgaccgaagaacctttcactgttgaataagaaaaagccctgccgaatcggcagggctttttaaagatcagtcagcaaacgcctcctgcaataatcgatacgatcggagcttatcttcaaaatgatgtgtgatggtcaccaccatgatttcctctgtttcatacgctttactcaaagctagcagccgctccttaacctgttctttcgtaccgacaatcattcgatttcgattatcagcaattcgtctctgttcataaggagaatacgtatttttccgaacagcttcatacgaaggaactccctctaaaggaataccctgctctcccgccaaaagtgtaaaatcaagcacagccccaagctcctctgccttctcctccgtgtcagcacaaagaacaaaaacagcaactgccgctcgaggcgtatctcctaacacagacggtttgaatcgtctcttatactgtctgacagtaccctctccgccctctccattgataaaatgggcaaacatatagccagcgccagattcagctgcgagcagcgcgctttctccagatgagccgagcagccacacatccggagccgttgaaatatgcggcgcagccgtcagattcggaaaacggtgtttatcatccgccaaatcatgcaaatacatggtcagctccttgatttgctgcgtatactgatcagcattgcgcttaccgccgtcattcagcgcccatgatgcaatcggcattccccccggtgctctgccaagccccaggtcaattcttcctggtgtcagcccctccagaacacgaaagttttcagctactttataagcactgtaatgcggcagcatgactcctcctgatccaacacggattcgctttgttttcgccgctatatgactgattagcacctcaggactggaccctgccagccgttttgaaaagtgatgctcagaaacccaaaatctcttatatccaaggtcctcagcagcttgggcaagcgcaacggtttgctgtaaggccgtttctgcattgctgccctctgatactggagattgatctaatatacttaatgaaaccatccctaccacctcatcctcatcgtatcactgatcttctactttttctccaaagccgctcacattgcttatcagtgtcccctatcattcgccatttatttgtgaaagcctgtccctatttgtcggaatatgttacacgtgaaacataaaaacccctccagacggagaggtttgctttagtttttattaaagcccttttctttcacgtagtcatttaaatacgtacgcggcttttgcttcataaagttcagtatttgatcggaccacgtttcttcccgctgcccgtttgttctttctctatagtaatcagaaatggttttgtcatacgtattcatagtatgacggaaatcgtctgtgttcacattatacgtattctcatgataaacggcctgctttggcaatctcggttttttgccggaaaggttcgcaggatggcctactgccagtccgaaaagcgggagcacatggtcaggcgtttgcagcacctctgtcaccttgtccagttcattccgaatgccgccgatatagcaaatgccaagccccatggattcagcggcaatgctcatattttgcgctgccagcgccgcatcaatcaagctaaccataaacatttctgtattctcgagcagctcagaaatatgttcacctttttcctcagccagtttttgatggcggtacaaatccgcacaaaatacaaaaaagtgtccgttcttctcaacgtaaggctgattcccagcaagcacggacagctcacgttttttctcaggatcagaaaccccgataatcgaatatgcctgcacatagctggatgtagacgcagcctgcgcacttttcactaatgtatcaatttcttcagctgtcaaaagctgatcagtaaaagaccggattgaccgatgattcaaaatggtttcgattgtgttattcatcacaaaaacctccttatcactttttatcatatccgaaaaaaagtgatctcaaaagcgaaatgctctgcacaaaaaaagacagcctctgtaaaggctgtctgcatattaagaattaaaaagataacttctgtatttcgtcagctgcacacttgcattatatacaatcccaaatccgattaacgtggaaagtgtcgagcttcccccatagctgacaaacagcaacggaatcccggtaacaggcataatgccgatgttcattccgatattctggaatgtgtggatcacaattaacgccgtatagccaacgcaaaagaaagaagcgaaacggttaaacggatgtattttgtctatcagaacaacaagcctgtagattaaaaagaagaacatgatgacaacaattgcacagcctataaagccaaatgactcacctattatagaaaagataaagtcagtcgtactctctggaacataaaccttcaaattagaaataccattacctaaaataccaccagatcctattgccatgatggcctggtcaacttgccagctgtcatttgaatcttcctgtgtctcatttgaagcagacacccaagaagtgacccgcttaatttgataatcctgtattccaactgatttagcaacgtcaggaaagtttatcattactaataaaattaatgaaatgagtaagatacctgaaccagctatgatcgcaatcaatttccaatttatacctgacataaaaaccattacaagaacgataaacatacatattcccgcagtcccagcatcctgcatcaagataagacctacaggaataactgcgacacccgcaatctttaataacaagtggatatcatccctaagcgtccgaactcctttaggattagcttttccaataactgaagcaagcatcataatcaaaccaaccttcataaactctgacggctgtattgttattctaccgatcctaaaccaactttttgcccctttaataacaggtgcaatagactcgggactgattttaagaataatcaaagataaaataccaatgataaaaatatataaacttaacttttcaagctgttctaaatcaaagtacaaaagaactgtaatggcaacagcccccaaaaaataaaacacaatttgctgaatccaatccgtgttcccatactgcccaaactgaccggcagcataaattgatactacgcttataataaaaaacacaccaaatataaaaatcaaatccccctggtaaaaggggctttgctgtttcttatatcgactcattctatcccgccttacattttcatcggaaaatcactaatgtttattatacatgaaccacgttcaagatgacacgtgaagctcgcttccttttatgttttttcagcatttgcggcgctttttcagctacacgaaatatgacgtatcataaaccgaaatgtttcgattgacacaaaacttttcaaatgaaaaaaacgccataccaaaagaatttgttaaaaaacgaatgcgataatgtgttatattcccaaataatgtgatacctcataagaaacagctaaaaattcagagccccatgcccatacattctcctagcacattaaacgaaaaaataagacgatagatccagtccatttctgcaaaaacacgtatcaatttctggaaaacatggtataataattgtaacagaatattcaaaaaacaatcacaaaacagacacaactcagttcctctatttcatttttgtaaacgttatcacaaaatgaaaggagacgggtatgatggacatgttttttgcttacttattggttgccagcgcaacgcctctctttatttggcttgataacaaaaaagtcgcactctcagctattccgccaatcattttaatgtgggtattcttcttcttttacgcaacagaaagcctttctccacttggacacactctcatgattatcttgtttgccgttaacgtcattgtcgctcatatcgccgcatttatcatttacggccttccgtatcttcgcagaaagcgaagcagctgaagacagcaaaaaaccctcttccaatgaagagggtttttgtattattcgttatggcctgaatgctctgagtgttcagcgcctccaggaggatttccgtccatatggtcaccatggtgatagtgagccgcgaaaatccagatggatccaagtacgataacgatcgcgccaaagaatccgaacagcgtgtttccgacttggatcgtgccgttttcgctctctgtcatatgcatgaacatgagaagctgcagcgccgcctgaatgaaggcgaagccgaagataatccaaagttttgctgatgagctcaggtcagtatacactgcaacccatagagccagcagggtcaaaacgatagacaggataaaacctacaatgtgtttccatggaaagtgactgtgttcagcagatttgtttgccattttacagacccccaatcccatgagatagacacctgtaaagatgaaaatccatacaacatctaagaagtgccagtacaagcttgagataaagattttagatgaagtttgcggagttaagccgcgtttcttcaactgaatcagaattcctgtgatccagaaaatcccgattgttacgtgagttccgtgagttccaagtaaaacaaagaatccagaccagaacgcacttgtactgagagccgctccttcatgtacatagtgaacaaactcgttgatctcgcatccgacgaagccggcaccgagaagaagagtgataattgtccaaatgactacgccttttaaacttccgcggcgcatttcatgaacagcgatcccgcaggtaaagctgctgatcagcagcaagaacgtcataatcattaccagattgacttcaaatagttcgtctggcaagacacctccagctgttctgtttttaagaacgaagaaggttgcaaatagtgttgagaacaacacaatttctgcccctaaaaagatccaaaacccgagaatattaagtctgccggtttcagattgatattccataggcgcgttagaattgccgtgttctgcatgttccataactcacgcctccttattcggaaatctttctttccgtctcttttatttcatcaacactaatgtagtagccgttgtcgtattcgaatgaacgcagaaccatgcagagcaggactccgatcaatccgactacgcccatccagtaccattcaaagacaagtccaaagcctgcaagaccgaaggcaacagacataaagaacggtctgcctgagttgcttggcatatggattttcttgaatttgctttcagggtataattcagttttttcttctttcatatgcaggaatgcatcttgagatttgacttcaggaagcaccgcaaagttgtaatgcggcggaatcgcagaagaagtcgcccaatcaagcgtacgtcccacaccccatgaatctccgctgatttcacgagtagagtaacggaagctgtagtagatgttatagcaaaggattaagaatcctacacccatcatgaaagctccgactgttgagataaagttcaatgttgtccagccgtcattcggtccgtatgtgtaaatacggcgaggcatgccttgaagccccaagaaatattgcgggaagaaacaaatattgaacccgatcataaagatccagaagaaccattttccgattctttcgttcagcttgtggccgaacatttttggataccagaaaataaatccggcgaaacaagcaaatacagtacccgcgatcagcacatagtggaagtgagatacaaggaagtacgtattatggtattgataatccgctgctgccatcgcaagcataacccctgtaaccccgccgataacgaagttaggaatgaacgcaagcgcccacagcataggtgttgtaaagctgattcggcctttatacattgtaaagagccagttaaagattttaaccccggttgggattgagattgccattgtcgtaattgagaagaatgagttaacggacgcactgttccccattgtgaagaagtggtgagtccaaactaagaaactcaatacagagatggcgataatagaaccaaccatcgctttgtaaccaaacaattgttttcttgcaaagcttgagatgatttctgagaaaataccaaacgccggaagaataacgatatatacttcaggatgtccccaaatccagaacaagttagcccaaagcatcggcataccgcctgcttccaatgtgaaaaagtgagcgccgaacaaacgatcaaatgataaaagtgctaatgctactgtaagtacagggaaagcaaacacgataataaccattgtgatcagtgttgtccatgtgaacattggcatacgcattaatgtcatgccttttgttctcatttttaagattgttaccataaagttgatccctgtcatcagggtaccgataccggcaatctgaagtccgaggaggtagtagttctcacccggcccagggctcatgtcgttacttgcaagcggcatataactcgtccagcctgcgttcggagaacctccgataacgaaagaaatattgaaaagcatcgcccctacaaagaacgtccagaagctcaggttgttcaagtaagggaacgcaacgtcgcgggcaccgatttgaagaggcacaacaacgttaataagaccgattaagaacggcatcgccatgaagatgatcatgattgtaccgtgagttgtaaaaatttcattatagtggtttgagtctaaaaaactgttattcggaagcgctagctgggcacgcatcatcagaccgtcgacaccgccgcggaataacataattacagcagatataatgtacatgattccgagttttttatggtcaacagtagttatccattcagaccacagccatttccactttttgaagtaagtcagtacaaaaataatggcaatggttgaaagcgcaatggaaacttgtgcgcccagaattaatgggtcaccagttacgaaaaattcgtcccatttgaatttcatgcaggcttcctcctttcctgatcaatatcattcttctgtatcatcagacttcttaaattcgtttttctttacgttttcaaacggatctgttttagagtgcggtgaaacggcttgatagccaaggcgtttgcgcgcctccatcgcgtactcagcgtcttgtccgtgatcaacgtatttcaagtgagtagaagagaacgttaattcgtccacattttcaggaagcatcaattcatcatacttctcttttgtcagcttaggagcctcgttctgagtctttttcacccagctgttaaagtctttttctgtaactgcattcacatcaaactcttggtctgcaaaatgttcacctgtgaagttcgcgttgcggccttcgtaagtacccactttgtcagcctgtaagtattgatccatcagcattcctgccatcgcatatttttgccctccaagctgaggaatccatagcgaagccattgaatctgcagatgagattttgaacaagatcgggcggtcgacaggaatgtttaagtagttgaccgtttcaatatcctgttcagggtagctgaatacccatttccagtctaccgaagtagcataaacaacaagaggctctttatcttttgttgcttcaggagctttttctaacgaatatatcgtctgtactgttggcacagaaagtgcaatgacgattaaaattgggatcactgtccagactacttctaaaaacgtgttaccgtgaatttctgggttataagatccattatctttgcctttacggtcgcggtattttactaaaataatggtaaatagaacaaagacgaccccgacgataaacagcataaatccgatagataacaggattaaatcactttgctgttcagctacaggtcctttcggatctagtactgaagcattgctgcatcccccaaggacgaaaaccacagttaacagcgctaatacaagcaacggttttaatgctctgaacaagaagatcaccatccttcctattgatgtaataaatctgaagtgcatacttcctcaaaatcttttctctactttgttatgctatcaaaaacttcacttattagctttatttttttataaacttcatcccattttcgcttaaatgtcataaaatcgacaaaaattgctccaactttattcacatctatcgcttaagatgaaaagtttctagttatttccgcatataagtaaagaaaagatgatgaagaactaattctgacaaataaaggtttaccacaataaaaaacttaggtcaatcaaaaatttcattttgttaaactttctagataggaattattttttccttgtctagcatcttttcacacggttaccattttaacgcatcaaatattgaaagaaaaggcgcaatgaagagccaatatgctctgaattgtccgtattttttaatgagagcatccagttgtttatcttatacaaaaaagaggaatgatataagcaaataaataaaaaataggatgtgttgcatgatgagttttcttatttcacttatcgtcgctattattatcggatggcttggaagcctgtttgtaaaaggagatatgcccggaggaattatcgggtctatgatcgcaggtcttattggcgcctggatcggacacgggctgcttggaacatgggggccgcacctagccggatttgccattattccagcggtaatcggtgcagccattgttgtctttctagtaagcctgttaaccagaaaaagaggataaaagcagcagcacccgaagcgtcagcgctttgggtgtttgttttgccataaaaatcgaaaaagcctcaaccctagcggttgaggcttttgactggtttggcgcccaactggtcgataaaccttctgaaggcctgttttccttctgttgtctgtttaaacacaccggcgtgttcaaggatgcgcgcgaatacatgtcccagctcttcttttatgactagatctgcattctcttttgttatggttcttttttccatcatccgattagcccactcactatgttttgccgtgagcggattttgttctaaagctgttttcggatcagcagagcatagcgccgctgccgtttctttcatttcctcctgtaagcggcccggcaatatcgccaatcccatgacctcaatcaggccgatattttcttttttaatatggtgaacttccttatggggatgaaatatccctaatggatgctcctcatccgtccggttgttcctcagtacgatatcgagttcatacaagcctcccctgcgccgtgcaatcggtgtgaccgtattatggggcgtatcgcctgtataggcggcaatgccggctttttcatcggaatacgtctgccacgtgcggaagatatggtcagcagcttcggcgacatgacccggttcgtctccttggagcctgagcacagacatcggccacttcactaagcccagcgacacgccgggataatcgtttaattcataaacgtcttccgcttctgcacgtgccattggaaaatcatgcgcgccgccttggaaatgatcatggcttaggatgctgccgccgacaatcggcagatccgcgtttgaaccgataaaataatgcggatattggccaagaaatgacagcagcctttcaaatgtttttttgctgatctccatcggttcatgttcaccttttaagacaatgcagtgctccggataatagacatatggcgagaattgcaggaaccattgttcgtcctcaaggatgaccggaatgattctgtgattttgccgggctggatgattcacgcttccctcgaagccgacattttctttacacagcaaacacatcggataatttgtctgttcctgctcttttgcagccgcaatcgctttcgggtccttttcaggctttgataggttaatggtcatttccagctcgccatattcggtcggcaccgtccaatgaacatttttggcgattctgtcagtccgtatataatagacatcctctgaatattgatagaattcctttgtcgcctgttttgggccgtataatgcttttgtctcttcaaatttgcgaatgacctcggacggggcaggcacaaaacagcccatcagctttgcgctgagcaggtcacggtacgtatctgtatccgcttccattcggccggtttcggcagcccatttatagatgggagctagcaagtccggcaggctttgtgactgcttgatgctggtgctggagttcggctcgggatgtgtgatgcccagcgcttcataaagacggtttctcgtatattcccgatcccagatcgaaatcaattttcgttccaggccatactcaagcagctgttccagatgttcaataatactcatatgtcactccccctttagttctctcgctccctctccgatatccgcgacataaaagtccgctcggagccctgttttttcttgatatctgtctccaaccttctgaataaaatcatcaacgaactcatcttttacaatgctgatggtgcagccgccaaagcctgctcccgtcattcttgatcctattacaccttcgtgatcccatgccgcaaacacaagctcatcaagttcagggcatgttacttcatagtcatccttcaatgagaggtgggattccttcattaactgcccaatttcatctatattgttctctttgaacatatgggccgtcttaatagcacgatgattttcgtatacagcgtgctttgcccggcgtctgttcgtttcattttggatcaggctggaatgcgcatcgaaatcagaaggcttgatgtcgcccagtgcggcaatatcgaggccttttttcagatcaagcaatgcatcattgcattcttggcgtctcgtattatagctcgagtcagccaatgtcctttttttgttcgtgttcgcgatgaccagcgcgaggcctgagacattgagtttgctatattcatagtcaagcgtgtcacagttcagcagcatcgcatgatgttttttccccattccaattgcaaattggtccataattccgcaattgacgccgataaaatcgttttccgcatgctgcgccattttcacaagctcaagcgcatctacttcaggatgaaaatagctttggagcacgacccccatcagcagttcaatagaagcggaagacgacagccccgccccgtttggaatattccctgaaaatacaatgtcaaagccatagggaactgcatatcccctctgttgaaattcataaatcacgccttttgggtagttcgcccagtcgtcttctttttgatagcgaatgtcgtcaaggctgcattccttgatcccctcgtctttaaagttgtctgaatacatccgaacaagcccgtcttttctttctgcaacagcagcatatgtacccattgtcagcgcgcacggaaagacatgcccgccgttatagtctgtatgttctccaatcagattcactcttccaggtgcgaaaaaaaaccgtaatccctctttttctccgaatacacttgcaaatatcccctttagctcttcccgcatgtgcaatcacctttctggtttttattttttattccccttatttctccatagaaaacggcagatcatatgctgcagtcctctcataccccttcttcttttgtttttttaaagacgagccatttgctcgcaacatagttgacgacaacaatgaccgcgttgtcgagtattttggccaaggtttcatttgtattgaactggccgacaagaatgatcatcatgcctaaatctatgccgagagacaggacccgaacgctgaaaaaagcagtgagctctttcagcaggctctgcagatcatgtgttttttgctgaaacacatataatttatttgttatgtaagcaaacagcacggacaaaatccaagcggcgacagtggcggctttgtaatccacattcatgatctctaccaatatataaaagctggcgatattcacaatggttgtgaaaacccccataatgatatacataattatttctctatacttcactgatgttcctcgctttctgaaaaacttttcaaaattcttggcctctcgtgctctctgtctaaagtaaaaaataccgaaagtgcgtctaaaaagctgcggaaggtggctggctggcccaatacatatgattgtttgatgattccgtcgaggactgcacatattattttagccgtatattcaggatcaatacaggcgtcaatcagctttctctccttcagccacttaatatataacacattttcttccacccacaattcgtacagccggacataggccttgcatttctttaagactttatatgtcggcatgttcatggcaaacgaggtgatgtcccacgacggcttatttatgtaataggaataaagcagttctgcagcgtgttttgcagcctcgtccaatgtcagcgatttcactgactcccgctccatttgatcaagataccctataatgatcttttttttcatctgacgtttttcgagaaggtacagcagaaaatcgtccttgctgacaaaatgaacataaaatgctcctttgctgtacccggcggctctgctgatatcttctacagaaaccggatcatacgctcggtcaatcaacaaattcacgccagcgtctataaaactttcaaatgttgcttctcttttaatttgaaatttgttttttttcatatttttctcctggcggtaatgattacccttatcttacaccggatcaatctttagcggtatttatttctttgaacggttatgctattcggtttcccaggggtcatttttaataggctaaatgatttattttcatttacatactatccagtcagtatttaattgtttattattataaataaggtccattggttatattagtcatttttttagggaataggtaggtggtttttccttcagtttgtgaacaccgagcaactatgtgtgaaatttgttgtactcgcctcatcatcgcgctggcttgtcttttattgcccgcatgttgcaggaaaacattttatacaattggaggttactatgaaaactcatgttaaaaaagatttggacaaaggttggcatatgttaattcaagaagctagatccattggattaggcattcatgatgtgaggcagtttttagaatctgagacagcatcgagaaagaaaaaccacaaaaaaaccgtccggcaagactagtccgaacaggcggatctatttacctctggcttttctatcacctgatctgagttttcaccatatcctctattcaaaagcaaatcgctgcgctgagcttgaggacaaacggtgtgtcagctaactacgacagacagccggtgatgcgatcacctcttggcacatgcattgtcataaagaggtgatgcgaacatgataaccgtgctctggtaaacagcagctttgctgagaacaagctgcattcggtgaggttttgaaagcaaactcgtttatacacggccgagcttgaaaaccttcgcctgtctttagaccactgtgttcacctcttcacgacttccttcttttttcatcctccagatattgttcaacgcataaatcggactttcagtacatacctattggtgtacctttttgcttacgtttagcgaataaaaggaggaaagccatgtacaaagctgattataaacagattgctgcaacgccgtcttttcaagcttttttaaagcagaaacgcgcttttattgttccttctgcgattttcttttttgtcttttatttttcactccctgttttgacatcttatttcacctttttgaatgcaccggccattggagctgtttcatgggcttggctgttcgccatcgcccaattcgctatgacctggatactgagtactgtgtattcccggagagccgctcatttcgatcagtatgtaagcgctttaaaagagggtctgaagggtgaacagacatgaatatgactgcttttttattatttttggcgattgttggcctgacgcttattatcacgtattttgccgcgaagcggacgaaaacgacgagtgagttttatacggcgggcggcgggctcaccggcgttcagaatggactggcaattgccggtgactacatgtctgccgcctcgtttctcgggattgccggaatgattgcgttatatggatttgatggcttcttttacagcatcggttttctggtggcttatctcgttgtcttgtacatcgtggcggagccgcttcggaatcttggaaagtacacgatggcagacatgattgccgctcgctttaaagaaaagaaaatccgcggtgtcgcggctctcaataccattgccatctctactttttatatgatcgcccagctcgtgggggcgggcgcgctgatcaaactgcttctagggcttgattatactatggctgtcctcatcgtcggagtgctgatgaccatttatgtcgtgtttggcggcatgatcgcgacaagctgggttcaaattattaaagccgttttgctgatggccggcacactcgtgatttcgattatcgtgttttcgaaattcggctttagcctcaataccatgtttgaacagatgaaaacggctactccgctgggcgctgattttttgaaccccggaaataaatacaaggtgccgcttgagaccttgtcgttaaacttggcactcgtgctgggaaccgccgggcttccgcatatattgatccggttttataccgttaaggatgccaagacggcccgtacatccgttgtgtcagcgacatggattatcggtgtgttttacattatgacggtatttctcggctttggtgccgcggcatttgtcggttttgacgcgattacggcggctgatcaagcgggaaatatggcggctccgcttttagcaaaagcgctcggaggagactttctgttcgcgtttgtatcagccatcgcctttgccaccattttggctgtcgtgacagggttggtgctgtctgccgcctcagcatttgcccatgatatttacagccagatcatcagaaagggagaagcaactgaaaaagaacaaatgaaagcggccagatgggcttctgtcgccgtgtcagtgctctcgattctccttgcgatttttgcacaatccttaaatgtggcgttccttgttgcactcgcgtttgcggtagccgccagcgcaaaccttccgctgattgtgtttacagtcttctggaaacgattcaatgcctcaggcgctttatcgggcagcctgacaggcctgatcagcgcgcttgtgctggtatcgatgagccctagtgtgtgggacccggctggaggtgctatttttaccggtgatccgctcattccgctgtctaatccaggaattatttccatcccgctcggctttctcggcgcgtggctcggaacggtgctgtcgtctgataaaacaattgatgaagatacgtttgcagaaattcaggtgaaggcgcatactggcgtccatatggaacaggaataaaaaaagctctctttatagagagctttttccttgtcttttcttctgttcttcagaaatcgctttttcaaatacatccttgccggcagcacctggaattacagtgtcgccaataataaaggttggaacggctgtgatgtcagcctcttcataggcgtgcttcaaggcttggcgctgcacgtcctgatatgttcttatttccagtgctgatttgaatgatgcaccgtctaatcccacttcctcggcgagcttcgtcaagatgtcaatgtcgccgatattttggccctcctggaaaaacgcctgaaagacacgggtgttgtattcatgtcctttatggtattccttcgcaaaatggaagccttcaaacgcgaggtctgtatacggatggggcgagacgtttggaaaattgatctcgacccctaatttctccgccattggctgaattgatgtctgccacatgtactgtttggaagggtcattgaccggatcaagctgaggagatgggcttggacgcagttcaaacggcatccactcgacttcaacatcctttccttttatcgcttcttcaaaagcggcttttccaacgaaacaaaatgggcagacgtaatctgaataaactttaatgtgtactgtcatgataatctcctttcgtataaattgattttaaactgtaacaattaaagttacaactgttttttaaataaagaagccgataaggcttcttttatgattccagcaaacgctgggcaatatattctccttttttgcagccgcctgggcatgcatataaagcagaaccgattgtttgtgtatattcgtttaacgcatcctttgctgaaagagccttcagcatcgggataaactgattgtcgggatttttttgaaaactgataaacagaagacctgcatccatatagccggttttcggatcaagtccttctgtgtaagagaaagctcttcgcaaaatttgttttccagtagatttcgctagactgacgtgtgaattagacggaatttgattcagcttcacgggatctgtttcctttttctgtccgaaaggcgcccccgagctttttctgcggccgaaggtatcctcttggtccttgagggaagagcggtcccatatctcaaggaacattttgattttccgaaaagccatataggtgccgcccgtcatccagtcaggctcaccagactgaatccacacgatcgagttcatcaagctgtcatcctccgtgctctggttgcctgttccatctttgaacccgaagaggttgcgcggtgtttcaccattttttcctccgcttaaaaagcctttgttcacaaagcggacctcacaagtgccgaccgcttgatttagcaggttacgcagcgcgtgaaacgccacttgctcgtcgtctgcacacacttgaatgcagatgtccccgcctccctgcttttcatccaggttgtcattgggcatcgctggaagagcggctaggtgcttcggttttttgcttttcagcccgaaacggtcctttccgtctttttcaaaaaagccaggcccaaatccgaatgtgaccgttaagttggaaggggataaatcagcagactcacctgtatcctgcggcggcagatattgatttctctgctccgctgacattttcttgccagacgtcagcatctgtgtgagacttgtccagtttctaaataacgtaatgatgtcgcttttgtcttttgctgttacatccagtgcagcaaaatagacatacgtctgatgggcagttgtgattccggcctgatgctttccgtaaaacggaacaatctgctcctcctctttttcatcctttttcgatggcttagccgcagtctgaacaagtggagcgagaccgccgagtccgctggcaccgatcgcaacggctgcccccgccattgcccccattttaaaatgtcccgtctgtgaatttgttctgactttttttgttcatcgctcatgctgttacaaaactccttttatagcacattcgcaatcttcgacatggtttcagaaagagtcgtcagctttgtgctcagctctctgatttgcttttcacttaatttatcataagacgtataggactgatcatttgttttgtattttgccattaaaacttcaaattcgctgaactccgtatccagtttttccgtcaagtcggagtgatcttttacaagcgcgcttttcactgtttgataaacggcttcggagccttccacatttgccataaggtcgactaaatcgattcgtgagtagcgctcttcttctcccgtgattttcgaaatcccggcttcgttcagaagctccatcgcgcctgctacaatttgttcaggtgttaatttcagtgattgaattgaaccgtcaagctcttttacatccttgagaagctggtcagctgttgccttttccccggaaatatcttgatccttccaaatggccttctcaagcttatggaagcctgtccatttgtctccttcttcaacatcgttttctcgagcatcaattttcggatcaagatctccgaggctttcagcgatcggttcgattcgctcgtaataaacacgcgctttcgcatataacgttttggacttttcgatatcgccggatttcacagcacccgtaaatgcttcagtcgctttgacaagctggtcactctgctctttgacatagcctttatactcatccgctgcttttgccagctgatcgctagcctttttgccgctcttcttcgcttctgtcaggtcttctaaggacgctttcagtgactcggattctgtcttgatttttgctgtatccggtttgtctttttgcgcttctgtgtagattggctgaagatgcttttcgatttctgtatattcgaatggatagtcgctgcgaatatcgttttcaaaggaaagccagtagctgtttaactctttccccttcttttcaatctctttttggtctcctttttccgctgagtcattcagcttagaaatgatggtttccattttatttacggatgcggtgatttctttagtgatcccgcttttttcagatgaagctttttctttagttgaagatgtgtcgttggctccgcagcctgcgcacagcgcaaggatgcatccggctgatacagcgatttttgtgaaattcattttgtcagttcctttccgtttgtaaaatgttttgccgcttctgaaacaagcgcaatcagtaaaaagaggaaaatcaacatttgcggaatcgtgctgtacacagacggataaattcctagcaccgatacagacggcagccagctttctgcatcagacggaagaatgcccgccagttgaaggctgtgaacgccggttccgagaaatttcacgcacatatacaggacaaccgccattgatagaagaaaaaacggcttcaatggaatgcgcattccgagcttgatcatcagaacaccgacgatgacgagaacgataagccctgcggcagttccgccgatcagttcagtgagcgggagcttcccgacaagcccgatgaaaaagatgaccgtttcgagaccttctcttacaactgccagaaatgcaatgagcgcaaaggaaagcaggcttcgtttttttagtgcctgtgacttctggatattgattttttctctccatttatccattgaggcgtttctgtgcaaccacaccccgacatacaaaagcatgacagcggacagtacgccggtgacgccgccaagcaagaaattgttttctccgaatacactggaggagaacagaaccgtgacaccgatgccggctgctaaggaaacagccatgccggcagacgctccgccccagatccatgccgaggagcgcgtgacccgcgctttttttgtcatggttaatagtgctccgatgacaaggagggcctccatcccttcacgaatcgggatcagcgccgcatcccaccagctgtagctgcttgaagcgatcggctcgagcaattgaatcatttcgtcaatttgctttgataccttttcgggatggctgccgatctccgccttcatcagtgccagattttcctccgatgtcgtataggcttctttcgattgggacacgacgtctccctctacggcgagccaggatgtaactaaattgtcgattgcggatgacgcttcatccaattgttttttttctatgaactgttttgtgtctttcaagctttgtatataggctgttaaggacgcccttgattgacctgaggatgtctttttcagcacgacagcctgctgataggtttctaaatgagacgcaagctcttcaagctgtgttttgagcttgcctgcgtcttgattgataaaagaaagagaaatcatcgcgatattcgcgtccatttcactgtgagaagaaaggttttctttcttaatagaaggttcttcttttttccacttcgctttgaaggtttcaaacgtttgttgtgccgaatccatatccccgtcttttacggatttgatcatttgcttgtttaattgaattaatgcggcgatcggatcatcttccgcatgtgccgcagaaccgaaaaccatcaacaagctgaatagaataagtgccagcccccgagccatcatgttcctcctataattgaaaatgattatcattgtataacataatcatagccagttcttgtcctttgtcaattaaaatttgaaggtctgaaaaccttgatggacagcaaaaaagctgtccttttacagaacagccttttgaaggaagatgaacgattatctttctgttttatatgtttgaatttcctcacgaaacttgcgtgcagcactctcaggatcttccgcctgactgatggcgctgatcatactgacgccatcggcccccgcttggataacaggtgcggcattatctattgtgatgccaccgatgccgacaattggaatgctgatgccttggcggcgcactgcttcaataagagataccccttgtaccgctctcgtatcttttttcgtttcagtcggatagatcggcccaagcccgacataatcggctccgtcttcttcagcttgcttcacctcagacatcgtatgggcagaaacgccgagaatcatatcacctatggcagctcttacctctttcgcatttgcgtcttcctggccgatgtggataccgtcagctttcagcttcagagccaattccacatcatcattgacaatgaacggaataccagcttcacggcaagctgcctgcgctttttcagcaaattcaatccgagcctctcctgtcagcgcatccccgcctttttcacggaactggtacagggtggcaccgccttttaacgctttttgtacaactgtaacaggatcggctttcgtattgtttgaccccataatgaagtatacagataataactctttcatcatttcccgagaaatacgagtcatgagacagtcaccctttctatagccgcccattcttggacgtcttgttcagtaacagttgaaagcttgttcagcaattcaatctgaaagcttccagggcctttgtcagccgtctgctgtgcggcaagctgagcggcgaccccatacgaagtaatggccgcaatagcagcaaacaatggattttcttccacagcgcaaaacgcaccgacgacggaagtcagcaggcaaccggcgcctgtcacttttgtcagcagcttgtggccgttatgaagggtgtatacatgtgatgtgtcggcaatgacatcgacttcaccagtaatcgcaatgaccgtgtttagcttttgtgccgcttgctgagccagccggatgatgtcgcctccgccttcacccgcatcaacacctttgatcagccaatccgtcacaccgacggtatgggcaatttccgccgcatttcctctgattgcagcaaggcgaacctcacgaatgatgtcacgtgccgattcagttcggaacggtgttgctccggcaccgacaggatcaagaatgacgggaacgccatgttcattggctgatttccccgcgatgatcatcgcttcgactgactccttgctcagcgttccgatatttaaaacgagtgcacccgcaatcttcgccatatcggcgacctcttcttttgcgtacgccattacgggcgatgcgccgagcgcgagcaggccgtttgctgtgaaattcgttacgacattgttggttatgctatgcaccagtgggctgtgccggcggacagcagtaagacattttgctgctgattgtgcatccatgtttgcatcatcctttactatcttttttcgggtcccataaatacgatttcgtatgttcgagccaagctctggcggcaaacgacaagtaccggtcctttctccaaataatggcgaggtgccaagggatgaccggatcgacaagcggaatgactttcactttttccgggtcaaggccgcggcagatccgttccggcaaaagcccgatcccaaggtttgctgataccatctcactgataaaatcccattgtgatgtttcataaatgatatggggccggaacccagccttgatacattccgtcataattcggttgtgcaggacaaaatcctctctgaagaaaataaaaggctcgtccttcaactcacgcagctgacattctttctcatcagccagccggtgggaagggtgaacgacaagcattaaggtttcttttacgattgtaaacgaatgaaagatatcttcgtttgcgggaaggaccacaacgccgatatcaagagagccgtccccgacaccttcttggacttttatagaaccgtcttcgactagctgaaaggtgacattcggatagttttcacggaaatcgccgagcactctggggaaaaaccccgatccgatcatcggcggcagtccaatccgtacgtgccctttcttgacttccataatatcatttaattctgacgtcaggttttgaaatgatttaatgatttcctgcgcctgcacatacatgctatgaccggcatcagtcagttccacctgcctgccgtttcggtaaaacagttcaattccgagctcttcttctaaatttttgatcatttttgatatcgtcggctgagatacataaagggattgggaagccttcgtaaaactttttaaacgggcgacttccaagaaatatgttaaatggcggatatccatgtgcttcaccctttctatagacaaaaggaatacttcttattcttaatatatattttacctatagagagaccttatgtacaataagtatataagggaggcatcaatatgaaaaaactgttgctaaccgttattcaaatcgctctgttatttatatttgctcggctgattaattgggtgacagcccttcttcatataaatattcccggcagtataatagggattgtgattcttttcacattattgcactttaacattatcaagcttgaatggatcgagcttggtgcagcgtggcttctcggggagctgcttttattttttatcccgtctgccgtcggagtgattgaatacggagacattatgtcgaaatttggtgtcagcattctgcttgttgtcatcatcagcacgtttgtcgtgatggtgtctacaggaacgcttacacaactcattgcaaagagaaaggagaaaaagcatacgtgttcatcggaattgtaagtttgtttttaacggttttggtgtatttaggagcaaaaaaggtatatcaacgctttccgcgtgtttatacgtcgccgctattggtgacgcccgctgtgttagtcggtctgctgctgctggtgaatgtcccgtacgagtcctataatctcggcggcggattgctgaccgatatgctacagccggccaccgtggcattcgcgatcccgctatataaatatttccctgttttaaagaaatacgcagtggaaattattttgaatgtggccgtcggttcatgcatcgcgattatttctaccgctcttattgcgaaatggcttcacctcggcaccggcttaattgacagcctcgtcccgagatcagtgacaacgccgatcgcgatgaacgtatctgaaatgatcggcggaatgcctgccgtcacagccgtgtttgtgattttaaccgctttgctcggcacagtgatcggcccgatggtcatccgctatttccgtattgataacgaaatcgcgcggggcgtgctgctcggcacaagcgcacacggagcgggaacgtcaaaggcatttgagctcagctctgtgtccggcacgatttcaagcgtatcgatgatcttagctgcgattatgacgctttgcgcggcgccgtttttactttcatttatgtaaaaaactgtcctctcgagggcagttttttttatgtgcttccccttattgaaaagctcgcaaattacaatataatgtaatttgtggataccaaaggaggcaccctgatgcacaacttgcaggtgaggcggcattacgccgcgttaaaaggattttatttgtttgcttttctcggtacgggcagcatgattcccttactcagtatgtatttaacgaaggaacagcatttaagcggatcacaggtcggcttgatcatgtcactgggcccgattgtgatgattttctttcagccgttttggggcatgctcagcgactatacgcaaaaaacgaaaggcctgctggcggtttgcacatcaatcacaggcatcattggattagcctatattgcatttgacagtttccctctgtttattttgattgcggcctgttttgcagcctttcaaagcacgattattccactttcggacagcatttcactaaggtacacacaagaaacaaatggcaactacggcggaatccgcctgtttggttctctcggcttcggtgtcgcggtgtttgccatgggacaggtgacgaaccagctgtaccccattcacgtgatctttatctttggctgtgcctttctatgcattgctgccatattggcttcacaaatgcccggccagcagaaaacaacaacaaaagtcaatatccgcaaaggattccgggagcttatcagcaacaaaactttcctcatctttatgatcatcacctttacgacatttgctccaaacttagcgaacaatacgtatttcagtctttttctggacaaaagcggcgcgtcactttccgctatcggcattttatttttcatcggtgtcatttcagaaattccatttatgagattcgcccaaacatttatagataaaatggggctgctcaacgtcattatgctgtcaggcggagtctcattattcaggtgggcgctctatttcacggcgccttcactatggatcatttatgtgacggtctttcttcagggagtggccatcggtttatttatcccggcggcgcttcaatatgtgaaaaagattaccccaagacacgttgaagcgacagcactgaccatgtacgccgccatcggcaacgggttcggcaactggttctgcacatttgcaggcgggtatatttttgactacgtatcgattttcgcagtctacttgctttttggcattctgagcatagcaggctttggcctgacattatatttaatgaaggctgaaaaaaacaaacatacacttcatcagccggctgttacttttaaaccataatgactataatgaacaaaagaaaggatgtgcgttatgaacgggcaagagcgaaacagcatttcgaaagggttgcaggttgatattgtattgaaagcagatcaaaaaacaggaaaactgacgagagggacagtgaaggatattttgacgaaatcaagctttcatccgcatggcattaaagtccgtcttgaagatggccgcatcggccgcgtccagcagatcatttctacataaaaaaaagctgcccctgaacagggcagctttttcattattttttctgcagaaggaccactttcaggtagttgccttccggaaatgccgaaatcgttttgaaatcctccggcagcgtaaattcctcaatgatggtgtagcgttcgttcgtttctttaaaggcggcatcgataaagcctttgaatttcttcatgccaaaggcgctgctgtttgtagaggcaacaatgacacccttgtcagcagtgatggcgatcgtttccttcagcaggtttttataatccttggccgcgctgaaggtgcgtttttttgtgcgcgcaaaggaaggcggatcgagaataatcagatcaaagcgcaaatccttttttgcagcatatgaaaaatagttaaacacgtccatcactttaatgtcgtgcgcttcgtaatccagcttgttcacgctgaattgctcgatcgttttggccagacttcggtttgccacgtcgacgcttgttgttttctccgctccgccaagcgccgctgccacggagaatgcacccgtataagaaaatgtatttaaaacggttttcccttttgcatagcggtctctgatcgccttgcgcacatgtctctgatccaaaaagatgcccgtcatggcgccttcattcagatccaccgcgtattgaatgccattctcctggatgatgatcgggaactcgccccttctccctttcacgaagtcatcatcttcaacgtattgtccagccgtgtcgaagcgtttcttctcgtaaatcgctttataatcaagatccagctcatccaatgcggaaatcagcatgtctttaaaggtgtaaattcccttgctgtaccattgaatcagcaggtagccgtcataatagtcgatggtgacgccgccgacaccgtcgccctcaccgttgaacaggcggaaagctgttgtatcttgagcctcaaatagtttggcgcgcgcttgggccgcttttgttaatttggtgagaaaaaatgcctggtcaacctgttcatgtttattgcgggtaagcgtccagccgacccctttgttttgcaggccataatagccccgcgcgagaaactcgccgctctcagacacgatatcaacgaggtctccttctttcatgtgccccgcactccctgcgagagcttctttttcaataaggggatagcctttttttattttggcagcgtgtgctttttttagggtgagtagcttcatatatgtcgtcctctttctgtttgctttctcttatcgtaccacaaaacgccaagatgtctgcattgacagaaaggaaaggtttttctacgatagacaaaaagagtttcgaggaggagcagcatgccaaaacgaattgaccatacaggcatcatggtaagagatattaacgcgtccatcacattttatgaagaggtactcggcatgaaattgaaggatcgcatcacacacacgaacggtgtaatcgagcttgcttttctcggctttgaagacggcccggaaacagaaattgaactgattcaaggctacagcagcgagcttcccgctgaaggaaaagtgcaccacattgccctgctgactgatgacatcgcggctgaatatacaaaagcggaaaaaatgaacgcaaaatttatcgacgaggagatcacaacacttccaaacggataccgttatttctatatcgaaggccctgacggtgagtggattgagttctttcagcggtaaaaaaaaagaacgtacattttgtgatgtacgttctttttttatctataccaactgatatacgttgactcatcgcaaatcatagcttcccagcccatacgctcaaccaattcatggatgtttttatctttggctaaaaagacattaatgaatgagtcatatacactcataaacacaaaatccattttctcatcagttaaaacgagctctgctgcggcttcatcaagaaccgtccgcaagttggcctcagttatgtccaaaacgccgcggttttccacaatcggttctgcgtaataaaaccgattggatccgttcgcacctaatacctttaccaaactcggaatatgaaaatttgaaatatgatcctcactgggataatagaggtctccatttatgttttcatgtaacacctcagccaaatcctctctcgcgaactcgtcccttaaagcgcctatcgacgtcattaaagccagcgccagctcagcatgtgtttgaaagccgcaagaagacataaccttcttccaggaaacagccttgcctattcctcttatttcatcatcgtttggataaatatgctcgtaatcattttttctttttgcattctcccatccttcaggcatttggataaaaggagaaaagataagtgcagcagatgagtattcaactggtacttgttgtaagattggtgattcgtcatctaaccatatataatctagcatgcgcacctcctttacatattctaacattctctttcgtttaaaaggagatgatcagccctatgacaggctgatcatctatcacatcacatttttatccccagattcaaccgcactctcttcccgccatttttgatgatcccatattctgaaaaacggatagtagatggcacaggtgatcagcagattcaccagctgcataacggcgcccgacacctttccgcctgtcgccaggtaacctgatatgagcggcggcatcgtccatggcaccgcgattccggccggtcttgccaccagcccggtgctcatgccgatataagtcgcggtaatcgtgaggagcggtgcgatgataaatgggacaataaggagcggattcatgacaatcggcatgccgaaaatgatcggctcgttgatattaaatagcgcagggccgattcctaatcgtccaagctgcttcatttgtttgctccgggagcgcacaagcatcgtcaggacaagcgccaacgtcgccccgcttccgccgacattgatccaaatttgaaaaaactgagtcgtaaaaatactcggcaacgcctcgcccgcttggaaggcaagacggttggcatccatcgcgccgtaccaaatcggcgccatgattccgccaatgatggaagccccgtgaatcccgcacgaccaaagcagcatctgcacaaattcagcgatcaggcttccgccgagactgccgccaaggatggaaagcggtgtcccaagcaggtctcctacgacattgtgcagactctgaaaaggtgtcatttcaatcaaaaggcgcgccagccacacgagaaacacaatgataaagccgggaatcagcgcgacaaacgatttgcttaccgcaggcggcacaccgtctggcattttgaagacgatatttttttgaataatgtaccgatagatttcggttgaaaacaaggcaatcagcatggcgacaaataagcccttgctgccaagtagcgtgatcgggattccgccccctaccatgatggactccgttgagccatccggtgtaaacggcacctcaaacggcgttgccaatagaaatgcggcaattgaaatcgctccggccgaaagggcatcaacaccatagctttccgccagccgataggcgatcccgaaagcggcgatcatcgccataatatcaaacgaagcattgacgggatatccgagcttatcagcccactccttcccaaacacactcgccatgaaatcagcataccccggaatcggcaggctcgttaaaatcaagaagacagacccgataataatcagcggcatggtcaggataattccgtcacgcaaagcgctgaggtgccgctgtccggcaattttcccggcgacaggcattattttttcttccattacccgagtgaatgcgctcatcttaaaagcccccttttcacattgctttgtgaacaacctccgcaatgttttctttatcttattttgaaaacgtttacaaattcatttggaaaatttcctcttcctgcggaaaaaatctgcattttgccaaacaatcctgtctatgaaaaattttttccttctaactattaatctctcttttttctccgatatatatatcaaacatcatagaaaaaggagatgaatcatgaaaaacatgtcttgcaaacttgttgtatcagtcactctgtttttcagttttctcgccataggccctctcgctcatgcgcaaaacagcagcgagaaagaggttattgtggtttataaaaacaaggccggaaaggaaaccatcctggatagtgatgctgatgttgaacagcagtataagcatcttcccgcggtagcggtcacagcagaccaggagacagtaaaagaattaaagcaggatcctgatattttgtatgtagaaaacaacgtatcatttaccgcagcagacagcacggatttcaaagtgctgtcagacggcactgacacctctgacaactttgagcaatggaaccttgagcccattcaggtgaaacaggcttggaaggcaggactgacaggaaaaaatatcaaaattgccgtcattgacagcgggatctccccccacgatgacctgtcgattgccggcgggtattcagctgtcagttatacctcttcttacaaagatgataacggccacggaacacatgtcgcagggattatcggagccaagcataacggctacggaattgacggcatcgcaccggaagcacaaatatacgcggttaaagcgcttgatcagaacggctcggggatcttcaaagtcttctccaaggaattgactggtcgatcgcaaacgggatggacatcgtcaatatgagccttggcacgacgtcagacagcaaaatccttcatgaggccgtgaacaaagcatatgaacaaggtgttctgcttgttgccgcaagcggtaacgacggaaacggcaagccagtgaattatccggcggcatacagcagtgtcgttgctgtttcagcaacaaacgaaaagaatcagcttgcctccttctcaacaactggagatgaagttgaattttcagcgccggggacaaacatcacaagcacttacttaaaccagtattatgcaacaggaagcggaacatcccaagcgacaccgcacgccgctgccatgtttgctttgttaaaacagcgtgatcctgccgagacaaacgtccagcttcgcgaggaaatgcggagaaatatcgttgatcttggtaccgcaggccgcgatcagcaatttggctacggcttaatccaatataaagcacaggtaacagattcagcgtacgcggcagcagagcaagcggtgaaaaaagcggaacaaacaaaagcacaaaccgaaatcaacaaagcgcgagaactcatcagccagctgccgggctccgacgccaaaactgccctgcaaaaaagactggataaagtacagtcatacagaaatgtaaaagatgcgaaagacaaagtcgcaaaggcagaaaaatataaaacacagcaaaccgttgatacagcacaaactgccatcaacaagctgccaaacggaacagacaaaaagaaccttcaaaaacgcttagaccaagtaaaacgctacatcgcgtcaaagcaagcgaaagacaaagttgcgaaagcggaaaaaagcaaaaagaaaacagatgtggacagcgcacaatcagcaattggcaagctgcctgcaagttcagaaaaaacgtccctgcaaaaacgccttaacaaagtgaagagcaccaatttgaagacggcacagcaatccgtatctgcggctgaaaagaaatcaactgatgcaaatgcggcaaaagcacaatcagccgtcaatcagcttcaagcaggcaaggacaaaacggcattgcaaaaacgattagacaaggtgaagaaaaaggtggcggcggctgaagcaaaaaaagtcgaaactgccaaggcaaaagtgaagaaagcggaaaaagacaaaacaaagaaatcaaagacatccgctcagtctgcagtgaatcaattaaaagcatcccatgaaaaaacaaagctgcaaaaacggctgaacgccgtcaaaccgaaaaagtaaccaaaaacctttaagacttgcattccaggtcttaaaggttttttacattctaagaacatcgtacacaacctttttcccatccgcctcacaggcttttcatactattgctatacagccatgaacagcataaaatgaacgttattacagttatcaccacatatggcgggattgtgactgggcaggcaggcaagacccaatgatgcaaagggagtattaatgcctaaaaagcagggcattttaactcttcttttcgtgttgggctcataacggcgccttggacaaccccctattctcatgctccgtcgtcgcgtcgacgcgggcatttttgtcattttcagccgatatttctcacttttttcattttgattgtcaacttttcatttgatacgatgaacaagccgacttttcttcagcaaaggaggttttgattgcttgcataaagagattgcaaaagaattactgctgctcgcaggaggaaaaaacaatattatcagcatcagccattgtacgacccgtcttcgttttgatgtaaaggacgagacgaaaattgatatacatgccattgagaacctgcaaggtgtgcagggcacctttttccgttatgggcttttccagattatcttcggagcaggcgtcgtcaacaaaatatataaagaagtcgttcatgtatgggagaacgcgccttctgaagaacctgtccaccagaaaaaagccagccggaagctgaaccctgccgcagcttttgcgaaaacactgtccgatatttttgtgccgattattccggcaataacagcaagcggcctgctcatggggctgatcggcatgattaaggtgtttcactggttcgctgccggcagcccatggattaaaatgctcgacctcgtgtccagcacagcctttattttactgccgattttagtcggcttcagtgccgcacggcaatttggcagcaacccatacctaggggcagtgatcgcggggcttttgacgcatcctgatctgctggacccgtctatgctcggcagcaaaaccccgtcttctttagacatatgggggcttcatatcccaatgatgggctatcagggttccatgataccgattcttctttccgtttttgtcatgagcaaaattgagaagctattaaaatcgattgtgccgaagtcgcttgatgtcgtgatcattccctttattacggtcatggtgacaggatgcctcgcgctgattgtgatgaatcccgccgcgtccatcatcggccagatcatgacacaatcgatcgtctatatttatgatcacgccggcattgccgccggagctcttttcggcggcatctactccaccatcgtcctatctggattgcatcatagcttttatgcaattgaggcaacgctgcttgctaatccgcatgtcggtgtcaactttttagtgccgatatggtcgatggcgaatgtggcccaaggcggagcggggcttgcggtattcctcaaaacgaaacaatcaagcctgaaaaaaattgcgctccccgcttctctgaccgcgtttttaggcattgttgagccgattgtattcggggtaaatctcaaattgatccgtccctttatcggagcagccatcggcggtgctattggcggagcatacgtggttgcggtacaagttgtggcaaattcctacgggctgacaggcattccgatgatttcaatcgtgctgccgtttggcgccgctaattttgttcattatatgatcggtttcttgatcgcagccgtctctgcttttatagctacattgtttctcgggtttaaagaagagacagaataactggatttattcgttttcattcataaaacgggggatgaaaggacaaaaaagctatgaaaattaaaagaatcttaaatcataatgctatcgtcgtaaaggatcaaaatgaagagaagattctcttgggtgcaggaattgcgtttaacaaaaagaagaatgatattgtcgatccgtcaaaaatagaaaaaacctttatcagaaaagatacacctgactataagcagttcgaagagattttagaaacattgcctgaagaccacattcagatttctgagcaaattatctctcatgccgaaaaagagctgaacatcaaaatcaacgagcgcattcatgtcgctttttcagaccatctttcttttgcgattgaacgcctgagcaatgggatggttatcaaaaatccgctgctgaatgaaatcaaagtcctttatccaaaggagttccagatcggcttatgggccagaacactgattaaagataaactggggattcacattcctgatgatgaaatcggcaatatcgccatgcatatccacacagcaagaaacaatgccggcgatatgacacaaacgcttgatattacaacaatgatccgtgatattatcgagattatcgaaattcaactgtctattaatatcgttgaagataccatctcttatgaacggctcgtgacccatctccgctttgccattcagcatatcaaagcaggcgaatccatttacgagttggacgcagaaatgatcgacatcattaaagagaagtttaaggatgccttcctgtgtgccctaagcatcggcacctttgtgaagaaggaatacggctttgagtttcctgaaaaagaattgtgctacatcgccatgcatattcagcggttctaccaacggtcagtcgcacgctgagacaaacaaaaaacgcttttgatcatctcaaaagcgtttttttatatctgtattattggttgatcgccgggttgctgatcgtattccacttcgtataggacatgtaatggaaatactcatcgcgatacggatgttttgtattggagttccaaggcttttctccgccgcagaagtgcacgattgccgggttttctctcgtttcattatattgcttccgccctaacagagtcgatggggttttcagctttaacatgatataggtttgagcgttccagcgcggatgaagttcataccactgatcatataaaatcgcattcagtgcatcttggtcatgcagcacaagaaagtcttcgtctgggtgttcattgataaagttgatgactttttctgtgatgttttgctttctccaagactcaaaatcaataatcatgatacctgagttaaaatacttccctgtatcagtgacgttcatttctttcaggcgttcatgctgccccgcatcctcaacagcggctacggtgtatggcgcaatgtctaagtcccatagcttagaaatatcctctaggacaagcgcatcacaatcgatgtaaatcattcgtttgatgctttcatccttaattaagtcgggaatcgaaatgcggtaatacgcggcttttgtaatatggctgctctctaccgcatgttcatacattttggtatccacttctaaaaactcaatcggcactccgaatttcaaagtggtttcttccagtctttttttgttatcaggcttaattccgccatcaatgacgtataattttacctctctctcctgatccatgttagtcaataaagaaacgaacatcccacctaaatgacgagcataattatcatctgcgcatgatacgatatgcatgatttcatctttcctcaatggtattcatctccctttttgttgtacaagttacataccctttttcaaaaaaataaacacgttctccgacatttttttaaacagaatgtgtgatacaacaaaaaaggtgtcattttttgaagatgcgataaagccagtaaagaatgaaaaagcttgcgattgtgatggcttcagccgagacgatataccacggccatggcccgagaacatctaagagagaggatccgcccggttttttcgtcaaatacatataattcgcgccaagccagcgatcaatcaggaaaatacagacgccgtacacattaacaagcaggactgtcacccataacgagcgctggcccattctgtaggtgccaatcacagccatcagcagacaggataaaaacacagacccgtgagaaataaaaaagaggatatatcggatatgcggaaatgaaaacattccgaggtcaggagtggcaagagcctgaatcgaactgccgatgccgacaaaaaacaaaaacacaaacagctttctgctttttgtcactaacataatagctgacaaatacaccgacaggtcactaagctggagaggcaatgaagtgcgcaccgaccacctgcccgtggcgaccaaccatatttgatagccgatttgcgaaccaagcaaaagaaacacaaacagagaacgcaaaaaccggctggccctcggctgcttgaccccctcttggaacaaaaccaacagaatggccaaaagggcgataatcgctaacgtcactacatgctctgtcgaaaacagatgaaacggatcatgcttatagacggattgaacatatttttgcaaaactgcacccccgtttgcggttttttgtttattttggcgttgtttgggctttttttattcaaccgatatatgggcttgaagttcacatcatcctctgttacaattcgtttcatagctaatgattctgataatttaaggcaggtctaaaaaatggaacgttcacatcaacatcagcagcttcggaaggaagaacacgatacactttctaagctcaaacaaatgcccgtcgagtcactcaacctggaagccatttcgatcgctacgaatctgtatcggtctgcacaaaggctccgtgtcaaaatggagactgaggttctttcttcctataacctttcttggaccgctttctccattctttatgatctatgggtatggggagcgctcgaaacgagaaaaatcgctgagctgtcagggatatctacagctacagcaagcaacgtgatcaaaacgctcgaaaaaaagagtttttgccgtaaaagcatcgacacaagagatcggcgactcgtgtttgtctcaatcaccgattccggcaaacaagcgatcgaagaactctacccggagtttcacaaaggggaaacagagctcattgcgggaatgacgaaggacgaacagaaaatattgacagggctgcttagaaaggtagctgacaatcttcatacaacataagctttgacgggaatccagtagcggtttgtctccctgtttcagagagccggcggaaggtgcgagccggcacacagcaaacgtgaattacctccccgagctttctttgtgaccttaaaagtagcaaagaacgggaaaccgttattcgaatgagcggaagacgatgtcttcaaccagggtggtaccgcgtgcattgagccacgtcccttatcgggatgggctcttttttgtgtttgtaaaaaaggaggaaaaatgatgaaaacatttgagcagctcacagcgtcacagcaaaaagaggtagaaagacagcttcagctatacatgacaggcgcccacgaagtcataccgccggaggaattaaaggcaaagctcgtgaaatcaatttccacgggcacgccgcttaaaattaagctcggattagatccgtctgcaccggatgtacatttgggccatacggttgtgttaaataagcttcgccaatttcaagaaaacggccacattgtccagctgttaattggggatttcacaggaaaaattggtgatccgaccggaaaatcggcagccagaaagcaactgactgatgaagaagttcagcacaatgccaaaacctactttgagcaattcggaaaagtgcttgatccagaaaaagtcgagcttcactataactcaaaatggctgaaaacattgaatctggaagatgtcattgaattagcagggaaaataacggtagcccgcctgatggagcgcgacgactttgaagaacgcatcgccatgcaaaaaccaatctcactgcatgaattcttttacccattgatgcagggatatgattctgtcgttctcgaaagtgatattgaattaggcggaacggatcagcatttcaatgttctcatgggacggcatttccaagaacgatacaacaaagaaaaacaagtcgtcatccttatgccgctcttggaaggcttggatggcgtcgagaaaatgtcgaagtcgaaacacaactacattggcattaacgaacatccaaacgacatgtacggaaaaacgatgtcactgcccgacagcctgatgaaaaaatacatccacttggcgacagacttagagcttgaagaaaaaaaacagctcgtaaaagacttagaaaccggcgcagttcatccgcgtgatgccaaaatgcttttagccaaaacaatcgtccgaatgtatcacggagagaaagcagcagaagctgccgaacactcgtttaaaacagtctttcaggaaaacagcctgccggaagatataccggccataaactggaaaggtgaaaaaacgatagcgatgattgatctgctcgtcaagctaaagctcctctcttcgaagagcgaggcgcgccgcatgattcaaaacggcggtgtacgcatcgacggagagaaagtaacagatgttcacgccaaagcagagataagagagaatatgatcatccaagtcggcaaacgcaagtttttaaagctccaatagtctgatattccgaaacgcttatgacccttcattcataagcgtttttttgcaggtataaagcagtcttttcaaaaacgctctccatcttgcaggaaactcctttagcatcccgaaatattccccaaccatacatttaggggaggtttatttttgatgaaaaagcttttgactgtcatgacgatggctgttttaactgccggcacactgctcttgccggcacagagtgtcacccctgccgcgcacgctgtacaaatatcaaatagcgagcgcgagcttccattcaaagcaaagcatgcgtactctaccatttctcagctaagtgaagcaatcggccccagaatagccggaactgcagctgaaaaaaagagtgccctattgatcgcctcatcaatgagaaaattaaagcttgatgtgaaggttcaacgattcaacattcctgaccggcttgagggaacactgtcttcagcaggacgcgatattcttctccaagcggcatccggctcagctccgactgaagagaaaggactgacggccccgctttacaatgcgggattgggctatcaaaaggactttaccgctgacgtcaagggcaaaatcgccttgatttccagaggagacctgacttattacgagaaagccaaaaatgccgaagccgccggagcgaaagctgtcatcatttataacaacaaagaaagcctcgtgcctatgacgccaaacctgtcgggaaataaagtcggtattccggtcgtcggcattatgaaagaagacggcgaagcacttacccagcaaaaagaagccaccttaaaactaaaagcattcacaaaccaaacctcccagaatatcatcggaatcaaaaaaccaaagaacatcaaacatccagacattgtgtacgtgacggcccattacgacagtgttcctttttcgcccggagcaaatgacaacggctcaggtacctctgttatgctggagatggcgcgtgtcttaaaaagcgttccatctgataaagaaatccgctttatcgctttcggcgccgaagagctcggcctgctcggctcctctcactatgtagatcatctatcggaaaaagagctgaaacgaagtgaagtgaacttcaacttagacatggtaggcacaagctgggaaaaagcgtctgagctgtatgtcaacacattggatggccaatctaactatgtttgggaatccagtcatacggctgctgaaaaaattggatttgacagcctgtctctgacacagggaggatcatctgatcatgtgccattccacgaagccggcattgattccgccaactttatttggggagacccggaaacagaagaagttgagccgtggtatcatacccctgaagactcgatcgaacatatcagcaaagaacgcctccagcaagcaggcgatcttgtgacagccgctgtctatgaggctgtgaaaaaagagaagaaaccgaaaaccattaagaaacaaatgaaggcgaaagcatctgacatttttgaagatatcaaataaaaaaagacggcacttgggtgccgtcttttttttataatgatcagctgtttagccgtctataagtaaagctttcagtttatcaactgtattttctttttctaacgggcgataaatggtcagtttcaaatcaggagagtcatatatttgtaatgtcatatgctccatcaccattgttccggctgccgggtgatgaagtactttttctcctgcgtgtgtgcctaatacttcgtggtggttccaccattttttaaattccgggcttctttcagttaactcatcgatcagctcttttatccatgcttccccaagaaaccggctggctgtcgatcgaaactgtgcgataagttttttggcgtggctttcccagtcgtcaagcagatcccgatactccttcgaggtgaaacatcgccatatggcattcctttccttactgcccatttggccaaaattgccgaacacagcacaagctgctgtgttccaagcaataacgtcccacttttcgtcagtcacataaacagggcaattggttaaatgatcaataaagtgccgcacagccagaggaaggctcttattatcttcatcctgatcatctaaaggaacatgatggccagccaacagaaagacatgacgcttttcctcataattcaatttgagcactctcgatatgctttccagtacctgtgttgatacccgaatatcccttccctgctccagccatgtgtaccatgtgacacctataccggacagctgggctaattcctctcttctcaagcctgttgttttccttctggtacccataggcaatccaaactcttgcggagaaagctgtgcccttttcagttttaaaaactcccctagctctttccgtttttctgccatactgtccacatacacactctccttttgcatagaatttcctattagtattctacataaaaaggagaaggtttttatattatttgtttcgttctccaaatacttcagcggccacaggaagaatggtattcagtgcattcggaaaacctgagtaaataatcatctgcatcatgacttctatgagttcttcttgtgtccatccgacattcagggctccgttaatatagaattttagctgctgggtattgcccaatgcagtcaatccagcaacggttgctaataatctggatttcagatcaagacctggtcttgaaaaaatctgaccgtagttaaactccacggcaagcacaccaaggtccggagcgatggaatgtttaaaattgtccacgatcgcttcatagttctcctcatcaatttgtttcagaatatctaacccttttttataacgttcacttgttcgcatcagcttctatctcccttccaatatcgcttttttagtagtacggtttatggtaatccttgaactgaaggcaataccgaccatgatcatccccaggatacaaacaccgttccaatgaaacagcatccagaccgcaccccctgcatacgatcccaaggcgccgcctaaaaacgtgctgaccataaagaggccattcaatctgctcctcatttcagccgacaattggaaaatctccgcctgacacgccacctgattcgcctgaatgcccatggtgatgaataaagcgcccaatacaatcacaatcaatgaagtctggcctgccattaataaaacaaatgacaataaggtaaaagacatacaaagcttgttggaaaaagcagctcctttttgatcaataatccggccgatcagcggagttgcaaaagccccgccaattcccaccaaaccgattgttccggcagtctggctgccaaacgagaatggaggttcactcaccataaacactaacgtcgtccaaaataaactgaaggcgccgaacatgaagccttggtttacacatgcttttcttaacactttctccttgatcaaaagcggaaataatgaagaaatgagttttccgtaatgaaatgcatgtgtccctttgcttttcggaaagcagaagtgaatgatcaacataatgatgacggctgctgcacaggcaatccaatacatcacgcgccagccataatgggcatctatcgccccgctgaccactctcgcccctaaaattccgcaaaccaagccgatagctacgtttccgagtacttttcctctgttcctgtcatttgctaaacctgccgcaaacggcacaaggatttgaggaataatcgtgaagaatcccaataataaatttgtgatgactagccatggaaagcttacagctaacgctgaagctgccgaacaaacccccactaagaatagcaggctcacaattaagcggcggcgttcaaaaagatctcccaatggaacaagcagaaggttccccgccgcatagccaatctgcgccaatgtagcaatcattccagcttgtgccggcgtcatatgaaacgtgcctgccatgctgacaagcaatgtttgattgatatagacattggctaccgtaaacccgctagtcaccgcgataagaaaaatcaaacctctcgataatgaaatggaatggttcatgtttacctcctttcttcatgcatgataaagcaggttcaatcatggaaacagaagtgagtttatactggtataaaaagtactagcaagcaaagcaaaaaagcgaaaccctgtcaggcttcgcttttgttatcaatccacttctttcttaatccccagcattttctcatctaggtaatgggcaatctccgcggcttccttcagctcatctgttaattgcttaggaacgtcattgttcaatttatagtaaattttatgttcaaggctcgcccagaaatccatcgcgattgtccggatttgaatttctgctttgacgtattccacacggttcgttaaattcacaggcatctcaatgattaaatgcaggcttcgatagccattcggtttgggtgtctggatataatcctttacctttacgattctcaaatcttcatgctgcttcaacacattcacgacattataaatgtcagaaataaaggaacagatgatgcgcacgccggcaatgtcgtgaatatgctccttcatttccttcgtcgtaatctcacagccctttctcattaacttattcacgatgctttcaaagcttttgacacgggattttgtatgttcaatcgggttgtgtccgtgaatgaggttatattcctggctgataattgagaactttgtatcgagcgcatctagcgcaaatttataaactaataattcatttttccaatcttccattactgtttttaaatcgtccatatgtgttacagataaatccattttcgtcatctcctttaacggaactttatccgctgtccatgtactagacgtccctgtctgctgcaaggttctatgaatttttttacaaaatgcggtcgattgtaacaaaaaaagaccgcacgaaacgagcggtcttttttattatcggaaatagctgatcaataatccgatcgagagcaggaatccgaaaaatgtatttgtttgggctgttgatttcattgcgacaatcatattcatcggcatttcgttctggacgaaacccttcactgcctgaaccggcttaggcacgctcaaaaagacgacaaacagccatgggcttgcggcaccggtaataaccaagccgacaacccagatataagcgacggcaaacgacgcagctaacagagtaacagctcccttatgccccatcaaaatcgccaatgttttgcgtccgccttttttgtcctcttcaatatcacgaatgttgttcgacaggttaatcgcgccgacaagaatcgcaatcgggatggaaatcaaaatgctttgcgtgttgatcatatctgtctgaatgaaaaacgaaatcagcacaaacaccgaacccatgcaaatgcctgagaataattcaccgaacggcgtgtacgcaatcggcagcggcccgcctgtatacaggtagccgatcgccatgccgacaaggccgatcagtgcaagccaccagctgctgcttgcacaaatatagacaccgagcaaaatggcaatcccgtatgaggcaagagctaattgcaaaatcgttttaggcttcattccgtggcgtacaattgcccctccgattccgactgattctgctgtatctaatccgcgtttaaaatcatagtattcattaaataagttcgtcgcgatctggatccataggcaagaaaacagcatagccaaaaacagcagcagatcaaccttcacataaaacatcgccaaaacggttccgagcagcacaggcacaaacgatgcggttaacgtatgaggacgggttaactgccaaaggatctgccccatgctttctttttgcggcgctgtctgaccctcacccttatttgtttggttcatcttcctcttcctttctattaaaaggcttactttttttcagccggcagcttaataaaaaactccttttgcttccttatctatcataatgacttctcccttatttcacaagataccgcaagaaggcgttttctttcttattatacgcttctcgccctgatttcattaggtttctgctttcacttgaacgaacaggtacagaaaaatttttttaagtacattacactttttaaaagttaaaaagatcttttgactccagctatcttttcctttattatgaatcagctcgaaacattccattcttgcccttgcaggtataaagattcattttcaaaaacatacgccgatatattaatttgagggagattagggaaaaaatgaaactttttgagcatctgatcgtcaaataatcatgtgattgtcgaaaaaacgggaagggaatttttgatatgctgcaattaatgaaacagctgtatgaaaaacccgctgtcaagtggacatgtcatacaggcttttatttgatgatactgcttgttttgttttttatgtatggttttcacaccgcgaataccggttcatatatttataacgatttctaattggagagagaataactatgaaacttttacatgctattcaaacacatgcggaaacttatccgcaaaccgatgccttccgctctcaaggccagtcgctcacgtatcaggaattatgggagcagtctgaccgcgcggctgccgcgatccaaaaacgcatttctggggaaaagaaatctcctatccttgtgtacggccacatggagccgcacatgcttgtttccttcttgggaagtgtcaaagcgggacatccttatattccggttgacctgtccattccgtccgaacggattgcgaaaattatcgaaagctctggagcagaattgctgatccatgcagcaggactctcaattgatgcagtcggccagcagattcagacagtttctgcggaagaactgctggaaaacgaaggcggctctgtcagccaagatcaatgggtcaaagaacacgaaacgttttatatcatttacacttccggaagcacaggaaatccgaaaggcgtgcagatttccgctgcgaaccttcaaagcttcacagactggatttgtgcagactttccagtcagcggaggaaaaatatttttaaaccaagcaccgttctcatttgatttgtctgtcatggacctatatccgtgccttcaatcaggcgggactttacattgcgtgacaaaggatgctgtgaacaagccgaaagtcttatttgaagagctgaagaagtccgggctgaatgtgtggacatcaacaccttcctttgtgcaaatgtgcctgatggatccaggtttttcacaggatctgctgcctcatgcggacacatttatgttttgcggagaggttcttccggtttctgtggcaaaagcgctgcttgagcgttttccgaaagcgaagatttttaatacgtacggcccgactgaagcgacagtggctgtcacatcggttgaaattacggctgacgtcatcagccgcagcgaatcgcttccagtgggcttcgccaaaccagatatgaacattttcattatggatgaacagggacagccgcttcctgatggagaaaaaggagaaatcgtcattgcagggccgagtgtaagccgaggctaccttggtgagccagagctgacggaaaaagcgtttttctctcatgaaggccagtgggcataccgaactggcgatgccggctttattcaagacggtcagattttctgccaaggacgtttggattttcagattaaacttcacggctatcggatggagctggaggaaatcgagttccatgtcagacagtcacagtacgttcgctctgctgtcgtgattccttatcagccaaacggaacagttgagtacctgatcgctgctattgtgcctgaggagcatgagttcgagaaggaattccagctgacaagcgctattaaaaaagagcttgccgcttctcttccggcatatatgatcccgagaaaatttatctatcaggatcacattcaaatgacggctaacggcaaaattgaccgaaaacgcattggcgaagaggttcttgtatgacgccttacagctcgtttttattctttatactgcttggcattcttcttctgccgacgatcattctcggcttaaacggaaaaagatttcaagcatacaacatgttcatatctatcattatattggctttaattttttcgcatgacttacacggggtcatcgcgctgtgcctgtttacaatatggcaggtgctcctgatcagcggctatctggcataccggcagaaagcgaacagcggctttgtcttttgcggggctgttatcgcgtctattctgcctttatttctgtcaaaaatatggccgtttctttcacacccgcagccgcatcatccgccgcataacctgatcagctttttagggatttcatatttaacctttaaaggcgttcagctgattatggaagcaagagacggactgctgaaagaacagctgccattgcaccgcctgctgtatttcatcctgtttttcccgacgatttcctccggcccgatcgacagataccgccggttcgtcaaggatgaacagaaggcttggacgaaagaagaatacgccgacctgttgtatacgggaatccataaaatcttcatcggtttcctgtataaatttattatcggctacgcgatcaatacgtacttcatcatgaatcttcccgcaatcacgcacaataagattcttgggaacctgctgtacatgtacggctacagcatgtatttattctttgatttcgccggctacacgatgtttgccgtcggggtcagctacattatgggcattaaatcaccagaaaactttaataaaccatttatcagtaaaaatattaaagatttctggaatcgctggcatatgtctctgtcattttggttcagagattatgtgtttatgagattcgtattttggatgactaagaaaaagtggatcaaaaaccgtatggccgtctcaaacatcgggtatttcctgctgtttatgctgatgggggtttggcacgggctcgcgccgcaatatatcatttacggcctctatcacgccgtgctgatgacgtgttacaactttttcgagaagtggaataagaaatataaatggctgccgtccaaccgctggacaaccattctcgctattgtgatcacattccatttcgtttgcttcgggttttacattttctcaggaaaaccatttcatcaccaccattaaaggagattagaaagctatggattttaaacaagaggtattagacgttttagcagaggtttgccaggatgacatcgtaaaggaaaatcctgatattgaaatttttgaagaaggtttgcttgattcttttggaacagtagaattgctgcttgcgattgaaaaccgttttggtattttagtgccgatcactgaatttgaccgggacgtttggaatacacctaacaacattgtaaatcagctgtctgagttgaaataatgaaaaagcgttttttcggtccaattattttggcgtttattctattcgcaggcgccatcgcaattccatcttcatggctgacaggcttcatcaccgataagcgtgtgaaagagtcagcaacagccttgaatccgagtatgtttcaagggctatatttacaagatcagatgctcaaagatccgacatatcttccgatttacgggtcttctgagctttctcggctggacgagttccacccatctaattattttcaggtaaacaatgagggattcacgccataccttgtcggcaaaggcggatcccagtcattgattcattctttaaacttcgctgcccatatggatcagctgaagggcaaaaaaatcgtattcatcgtgtctccgcaatggtttattaagcgcgggtctgatgaacagcatttcgcgccgaactattctgcgctgcaagggcttgatttggcatttaacgatcagatcgatcctgaaattaaaaagaaaatgatgaaacgcatgctgcgctttaaggctgtgcaaaacgatgccattctttctgagctgtacaaagcaatggtaaacggccagacgtggaaagtgaacgcgctgaagccggcggcgaaagtgtattacagcatgctggaaaagaaagatctgtattattcaacgacagaatcatccgggccaaagcgctatatctcgcagtcagtaaaggataagtcatggtctgaattgaataaactggcggatcaatcgggcaaacgccactccggttctaacgattttcacatcgacaaccctgtctataaaaagctgaagccgaaagtgcctaagctgaaagggaaaaacaaaggaagatcgtatgcggtgtcaccggaatatggcgactttgaaatgatgctcgatatcctgaaggatgcgggcgcagagcctatgtttgtcaccattcctgttaacgggaaatggtacgattacacgggcttcccgaaaaaaggacgcactgactattacaaaaaggtaaataaacaaatcagagcgaagggcttccaggttgctgatttctcagggcatgaatatgacccgtatttcatgaaagacaccattcacatcggctggaaaggctgggtgtatgtcgataaagcaattgacgaattttataaaaccggaaaagtcacttcatcctgagcatctcataggacgcggctgcatatttcctgctaagatttgaaatagtaaagaaatcacagccaacttaattaagaggtgttacatccaatgaagatgacaggcaatacggttttaatcacagggggttctgctggcatcgggcttgaactggccaagcgcctgctggaacttggcaatgaagttatcatttgcggacgcagcgaagcacgtcttgcagaagcgaagcagcagctcccaaacatccatacaaagcaatgtgatgttgcagaccgttcgcagcgggaagcattgtatgaatgggctttaaaggaatatccgaacttgaatgttctcgtcaacaacgccggcattcaaaaggaaattgactttaaaaaagggacagaggatctttttgtggacggtgatgaaattgaacttaatttccaagcgcctgtccatttatccgcccttttcacacctcatttgatgaagcagcctgaagcggcaatcgttcaggtcacatccgggcttgcgtttaacccgttagctgtttatccggtgtactgcgcaacaaaagcggcacttcactcgttctcgcttacgctcagacaccagctccgcgacacgagcgtggaagtgattgaaatggcaccgcctatggtggacacgggcttaaaccaaaaatcacgcgataaacaaggcctgacgtaccggggcatttcatctgaagaatatgttcaatatttcttggacggcttgaaggaaggcaaacaggagattacaaatgaacgggttgaaggtcttcgggatgccactcgcgccgattatgacaggttattcaagcaaatgaacacgcaggagaattaatttctcctgcttttttcatatgaatttcttacaaatttgagcaaacctattgcgattatttgttgaaggtatacaatagaatataattattttcaaataagtttgataatataaacaatttaacagcagggagattgaccatgactaaacaaacaattcgcgttgaattgacatcaacaaaaaaaccgaaaccagacccaaatcagctttcgttcggaagagtgtttacagaccacatgtttgtaatggactatgccgcagataaaggttggtacgatccaagaatcattccttatcagcccttatcaatggatccggccgcaatggtctatcactacggccaaaccgtgtttgaagggttaaaggcttacgtgtcagaggatgaccatgttctgcttttcagaccggaaaaaaatatggaacgcttgaatcaatcaaacgaccgcctctgcatcccgcaaattgatgaagaacaggttcttgaaggcttaaagcagcttgtcgcaattgataaagactggattccaaatgcggagggcacgtccctatacatccgtccgttcatcatcgcaaccgagcctttccttggtgttgcggcatctcatacgtataagctcttgatcattctttctccggtcggctcttattacaaagaaggcattaagccggtcaaaatcgctgttgaaagtgaatttgtccgtgcggtaaaaggcggaacaggaaatgccaaaaccgcaggaaactatgcttcaagcttaaaagcgcagcaggtcgccgaagagaaaggattttcccaagtgctttggctggacggcattgagaagaaatacatcgaagaagttggaagcatgaacatcttcttcaaaatcaacggtgaaatcgtaacgccgatgctgaacggaagcatcctggaaggcattacgcgcaattcagtcatcgccttgcttaagcattggggctttcaagtttcagaacggaaaattgcgatcgatgaggtcatccaagcccataaagatggcatcctggaagaagccttcggaacaggtacagcagctgttatttccccagttggcgagctgatctggcaggatgaaacactttcgatcaacaacggtgaaacaggggaaatcgcaaaaaaactatatgacacgattacaggcattcaaaaaggcgctgtcgcagacgaattcggatggacgaccgaagtcgcagcgctgactgaaagcaagtaagaaaaagccggcccagtacaggccggctttttttacgcttcaattttgttgaaaaactgcggcagatacgctttgtgcgcctccagcatttcatctaaaatctgtttggccacagtatcggacgggacaagagggttaatcgtcatggcaaggagcgcagtttgatagtcacctgtaactgccgcttctgccgcgacacgttcaaaggatttgatttgctggacaaggccgcggacagacaccggcaagtcgccgacagcaattggcttagggccagttttcgtcatcacacagttcacttcaactgcggaatcgtctggaatactcgctattgcaccgttattgatcgtgttcaccggctgaatgtcgtgtttatcattgtaaatcgagctgattaagttacatgctgcatcactgtagtaagctccgccccgtttttccagctgcggcggtttgatcgcaaggtttggatctttataaagctcgaacagctctttttcgaccttctgtacgacttcagcgcgggtgccctccatttgtgatgcttccagttcgtgctccagcatctcttttgttttgaaatagtaacggtgatagccgcaagggatgacattgagcgcttttaagaaatccggttcccattcggcgcctgagatatttttcatcgtcatcgcgtttttcgggtcgcccatcgcctcgatgacttgctccttcacacttacgccatccaagaaaacatccagcccaaataccatatggttcagtccggcgaattggacttctacgcggtccacatctacatcaagcgctttggctacgcccattttgatgccgattggaacattacagagaccgacgactttcttcaggttggagtagcgaagcaaggcttctgttaccatgccggcagggtttgtgaagttaacaagccaagcgttcgggcaaagctcttctatgtcctttgcgatctcaaggatgaccggaattgtgcgcaatcctttaaacaggcctcccgggccgtttgtttcctggccaatcactccgtattttagcggaatgcgctcatcctttgctcttgcctgcaaaagtccgacacggaattgggtcgtgacaaagtctgcgtctttcagcgcttttctccggtcgagcgtaagatgaatgtcgatcgggacgccagctttttcaaccatccgtttggcgagtgtgccgacaatattcagcttttcttcgccctcggggatatcgacgagccataattcgcgcacaggcagctcatcataccgtttaataaacccttccactagctcgggcgtatagcttgaacctccgccaatcgttacaatcttcaatccttttgtcatatgcttgctcccctttgctcggtgattttttcatataactcaatgatctctgcagccatatccttcactgtcattgcattcattaaatgatcctgtgcatgaaccatcagaagcgtcatttccgtcttttctccgctcgcttcattttggatcagctctgtctgataatgatgggcttttgacaattcttcagcagcgtcttgaagctttttccgcgcttcttctgcgtcaccgcttttcgcagcggcaatggcctccattgcggagctcctaccgtttcctccgtgaaggatgatttgaaaaatgatttgttccatttcctcattcacgcgattcacttcctttctctacagagccgcttctttgtcatctgatgctgcaggcgtttggaccagctccagatcgttttcttctttcagcttctgcttatcccacattctgaagaatggatagtagacaacaaaggacacggcaatattaatggcttgcatgaccgcacctgagacttttcctcctgtcgccaagtagcctgaaaagatcggcggcatggtccacggcactgcgatacccgccggttttgcgacaaggccggtgctcattccgatgtacgtaagtgtcactgtgacaagcggtgtgatgataaacggaagtaagagcattgggttcatgacgatcggcattccgaatataatcggttcgttaatattgaagatggccggtccgaccgcaagcttcccgagctgcttcatttgtttgcttcgggcgcgcaggaacatcgtgacaaccagtgccaatgtggcgccgcttccgccgatattgacccagatatcgaaaaattgctgggtgaaaatcttaggaagctcctcaccggcttggaaggcgatccggttggcatccattgcgccgtaccaaatcggtgccatgacgccgccgacaatgtttgcaccgtgaaggccgcaggcccataaaagcattttgacggcttcggcgacaaggcttcctccaaggcttcctcccagaatggaaagcggagtccccaataaaacgcttacaatattatgaaggctttcaaacggtgtcgcttcaacaatcagccgggctgcccaaatcaggaagatgacggcaaagccggggattaacgcgacaaatgacttgcttaccgccggcggaacaccgtccggcattttgaagactaaattgcgctggataatgaggcggtaaatctctgtggacaccattgcgataatcatggcgacaaacaggcctttgcttcccatgagcgaaagcggaatcccgccgccaaccatgatttctttcgtcgcgccatccggcataaacggcacttgataaggtgttgctaataaaaatgccgcaagggaaatggctccggccgacaaggcatcaacgccgtatttctcggcgagccggtaggcgatgccgaacgcggcgacaagacccataatttcaaaggtcgcgtcgactgggtaggccagtttttcagaccaggagctgccaaacgtttttgccataaactcagcgtatcccgggatcgggaggttgccaatgatgaggaaaaaggaaccgatgataatcaggggcatcgtgaggataataccatcacgcagcgcctgcaaatgacgctgtcccgcaattcttcccgctataggcatgaccttttcttctaagatctgattgactttattcacatagcccgcccctctctatgacacatgtccaagctgttcagctgatttcagcacttccgccccgttgcacgtgccataatggacggtattaatgacgtctaccggaaccccctttgactctcctaattttttgagctgcggaagcatgtaacggacttgcggaccgagaagcaatacatccgctttatcgatatgattttgtacagaatcgcctgaaactgcccaaatggtatagtcttttccctgttcctgcgcacttttttccatcttgctcaccagtaaactagtagacatgcctgctgcacaaacgagtaatatattcatgtaaaagaccccctagagtttgatcaattttgtaatgtcctgctgttgctatcatcatattatgaaatcgctttcataaacactcagggtttttccgcaggcaacggaaaaaaggtatatacaggctgtcagctcagcattttttggtcaaacacatccgaaagctcttgaaatgaacggcatttgaccagctggttcaccgccgccgggtcatccaaaatgctgccaagcagtttatacatgctttgcaagtccgctttgttctccttttcgacacaaagcagacagacaaattgaactcgctgactctcccaatcgatcggttttttgagcgtacaaacggcccaaaacgttgttttcgtctgcggaacaagcgggtgcgggatggcaacaagattgccaaaacacgttggcgacatgtcttctctttcaaaaatggaatctatgatttcttcatcggcaaagccgcattcgaccgctttctgccctaaaaattgaatcacttcttcttttgagcgcagatcctcctgaaaaaaaacgagttctttttttaggtagcgattggctttttccttttcatcactcagaatagattctatttttgtaaagtcagttccgcctaagatggtgttaaccttcagtactggtacagggagctcttttttaatcggaatggtactgatgacaaaatcaattgattcgtaggacatttgatcaagactataatactcagccgttccaagaatatcgagccgcttgccgaaatgggaacgcagtttttcgcgcagaagctgggcgcttccggcacccgatgcgcatacaatgatacagcgtttcggcggactttctgttttttttcgttcaatcgcggcgccaaagtggagagccaaatatccaatttcgttttcatgaatctcaatacccgtttgttcctttatcacgattccggcaatgatcccggcttcaaaagcgagtggataatgttccttgatcgctgccagcatcggatttcgaagattcatgccgtatcggttgcggctgatcgccggcttcatatgcagggccaagccgattttcagctctttgtcatgcaggatgccaagcttcagttcacgatcaacagctttgatcatggcaagtgtcagctgatcggtttcctcttctattgaaaatgtgtcctctccgcattgtgattgtgtcattcgttttgtgccaaggagatgcatggtgatgtaggccgtctcgtctttcggaaacgtaacggcaagctttgattccagctcttttacgatggcttctgcagcctggtactccttttgatgcaggatatgatccatatctttcgggaaaagagaaacatagttttccgttctgatccgtttacaggcgatagcgatatggataatgaggttattcagtcccatgttggacagagggatgcggtcgtttttcatttttttcaagatggcggaacggatgatctcaatttcttcttttggcaaaatatcagccttttcatttaaaacatctatctccgtttctctttcatcaacaatgtactccgccatgcagtacctcatctgcacctcgtccccgcgcagcttgaagccgtaattcggacgtgtttccatgacgatgcggtaaggcagcagacgtttctttacttcctttaaatccgtttggagtgtagattttgagataaatagttcttcagcaagttcatcgagcttgagataatggtccgccagcagcagacgtttcataagataggccattctctcctccggcaataccggcaggccctttttttgctgaaattcatcttgcagcagtgttctgaatacttgctcgtcatcaatgcggagcttgtagccggagcctcttacagattgtacaaaggcaccgtggccgcttagcacaccttgaagttcctttatatcattgcggactgtccgcgtcgttacgtttaattgcgcggcaaaaaacgaacttgtcaccggggcttcagccgccatcagcaagcgcagaatatcacgtagtcgcccatgaagcatgagaaaaacctcctaactagtagatgcagggattcagtgaataggcagaaaggatgatgaagggatgcgaaatgtatataaattctataatggagagaatggcaagtcaatgaacatccggaggactagagggaaaactgacctataaaaaaacagccgggatcagccggctgttctagatgcggacatattcttttgtttagacgccttgcggtccttcatgatttttcgaacaatcgggtaaatgaccggcgcccatttgataacggttttgatcatctttttcaaagctccgattctcccttcttttttctcaaccattcccctgattgcctcttccttaaacatgctaacgcgacacgtacctgtttcccgtcacccagaaacgccatggataatcgcgtgcctccccgctgttgtcaatgccgatgcgcgggccggttgaaattgcttccggtgtgtacccgctttcgatgtaaagcggctgttccgtgatccagcgtccgtagtcattcatcgtgacgccaagcgctttcgtcagctttcctggtccgtttgtccattccctcggactcctgcccggccttctctcctccattaacagctggccttcatgcggctcaatcgccctgattaatactgcttgcgggacatcctcttccgccgcaacgacattcagcaatgtatgggtgtgcatcacgtatgtatatacccgcccagcttctgcaaacatgatctcagtccgcttcgtccggcggttgttaaagctgtgggccgctctgtctccagcccccatataggcctctgtttccacaatatagcctgacgctgtgccttcgtctgtttcttttacaagaaggcagcccagaagcgatggggcaagctcaagagcggttttttgataaaacgtgatgggcagcggatttttttctctcgtcacgaatcgacctctccttttaccgatttttgtacattgtaccattcccgaagcagatcaaaaaaaacggctgttttaaaatctttccattcagggaatattgttaccgttcaaaaaaggagggccaaccattgaaagatgatcatcaaaacaagcagcaccaatcaaatgcccaagggagcgaggaagcgttttctcataagacatccgggaaaaacgagtcagaggataccttaacgaataggcaggggcatcctgttactgacaaccagaatgtgagaaccgtcgggaatagagggcctacaacacttgagaactatgattttctcgaaaagatcagccacttcgaccgggaacgcatcccagagcgggttgttcatgccaggggagcaggtgcacatggatattttgaagcgtacggaagcttcggagacgaaccgatttcaacatacacaagggccaagctctttcaggaaaaaggcaagaaaacaccggcatttgtccgtttttcaactgtgaatcatggaaaacactcgcctgaaacattgagagacccgcgcggttttgctgtaaagctatatacagaagacggaaactgggatttggtcggaaacaacctgaaaatcttttttatccgcgacccgctgaaatttccggatcttgtacacgcatttcagcctgatccagtgacaaacatccaggatggtgaacgtatcttcgatttcatttctcaatctcctgaagcgacacacatgatcaccttcttgttttcgccttggggcattccggccaactaccggcaaatgcagggttcaggcgtacatgcctataaatgggtgaatgaggagggcaaggccgttctcgtgaaataccattttgaaccgaagcagggcatccgcaacctgacacagaaggaagcagaagagattcaagggaaaaactttaaccatgccacacaggatttatatgacgcgattgaaaatggcgattatccagagtgggaagtgtatgcacaaatcatgagcgatgatgagcatcctgaactggactttgatcctcttgatccgacaaaactgtggtataaagacgattttccatggaaaccgatcggcaaattggttctgaacaaaaatccggaaaactaccatgcggaagtggagcaagcttcatttggaacgggggtgcttgtcgacgggcttgatttttcagacgacaaattgctccaggggcgtacgtttgcctactctgatacgcagcgctaccgtgtaggcgcaaattacctgcagcttccgatcaactcgccgaaaaagtatgtcgccaccaaccaggaaggcgggcaaatgcaatatcgggtcgatagagcagaaggacaaaacccgcacgtcaactatgagccatccattatgggcgggctgaaggaagcgaagcaggacggaaaagaccatacgccgcatgtcgaaggcgatgtaaagcgtgaagcgattgacagaacaaacaacttcggacaggctggagaaacgtaccggagatttactgaatttgagcggaacgaattgattacgaatttggtgaatacgctttctacgtgccgaaaagaaattcaggatcaaatgattgagaatttcacaaaagctgatcctgactacggaaaacgcgtagcagaagggctaaaaaaggtttccgaaaacaacagcaacgggccgatcggcacaactgaaacggaacaggctgcaaagcaggctgaacaggagagccatccatctaatccgtattaacaacagcgaacagggctttttttgaagccctgtttttttatttttctattgaaacgttttcaacaattgtgttgtactggaaggaaaggggtggagagatacgatggaattacagcaggacttgattcctcagaaaaaaacaatcggcgccttagatcacgccgtttttttatgcatggtattttgtttctggttttcaggctatatttacgttcctgtattcagtctgtatttggaggatctgcacttttcatatggcgcaatcggcatcattctcggcagctacggggtcacgcaaatccttctgcgattcccgctcggccttgtgtcagacatcctgttttccttgcgcaagcaattgttaattgccgggttcggcttttccgtcctcagcagcctgctttttctgatgtttgattctttcttcttcgtgctggccgcccggcttttcgcgggaatcactgcttctatgtgggtgatggcgaccattttatacgcacattatttcaacaatggcaatgcatcaaaagcaatgggcatcatgcagttttttaccgtcatgcctcagtttgccagcattgtgttctgcgggcttgcggcagcccatttaggcaggcaggttcctttttggatggcgctggcagcctcggtcgccggtctggtgatctgctgctttattaaggatccgtctgctcctcccgcaaaccgtgacaccattcgtgtcaatcagtacatcaaagatacattgcagctgccaaagctgaagcttttcaccatcctgtctatgacggcccatgccgtattatttatcacagtattttgttttacgccgctttacatgaatcagctcggaatgggtgacgcggagcttctttgggtgatgagcgcctttttcctcccacacgcagccgccacattaagctttgtgtttctgcgctttacaagccgtatcgcttactccgtgatgctcattagtttcgctgtcaccggggtctgtttgctatatgttcctttttcagctgcattgttcacggtttgcatcacacacgcctgtatcggactggcgctcggcttcgtttttcctctgttgctaagccatgtcgtcgaaatcagttctgcccgattaaaaatgtcagtgatggggttttatcaatcattttatgcgctaggcatcttcctcgggccccttcttgccggaaaaatcgcacagcttgtcgggcttgcgggagttttttatggagccgggtttctggcatttgccgccttttttgtgatgctcgcgcaaaaacgtaacatgatcaattaatagctttcataccgccggaagcgccacacagaaaacacggccagaagcatgatgcacagaatggagaaagtgagtgaccatccgaaaaaatctgcccgctctccatgaagaaggatatgctccgcctgcttgcaaatctcagccggaagccacttcgcaccatctggaaatagtgaaacagcaaaggaaacggctgctgtgagcccgatcccgcaagccgcagctgctccgacagaccggaatatcgtacttccggcaaggccggcggtcacaataaatatcacccaaagcgcgtaaaggccaaggcttgcggcaaagcggctgaatgatgcgtcctcaaacagcagccggacgtaataataagcaagcccgtatccagctgcaaacgacataatgccgatcacgctttggatgagccatttactcacgatataatgggctgccgtcacaggccgcgacataatcagcgctgttaccccttgatttctttcattggctacactgcccatcacgctaaagatgaccagagccatgccaagcgtgttgaattgagaaagcgtgcttaccatcacttcagacccggagggcatcgtaaaactgattttcatgccgtcaggaaggttccctccatgtgcgatgatttccggcatataataaatggtcagcggctgtgtcagcccgacgatcatcatcgcaatcggcagccaaatcagcttgccgcttttccatccttccagccactccttctgcaaaagcgccatcatcaccttcatgcgtgcaccacctttagatagacgtcttctagagactccgttttctgttcaaatcgggtgacggtcaatccctttcggatacagtcacttaataatgaccggccagcttgtatatcaggcagctcgaaaacagcttgggacggatttttatagacaatagctgagacgtaaggcttctcttcaagccagccttccagcttctctttcactgaaagggtaaaaacgttcgtttgctgctgttgtttcagctcctgtaactcgcctttccatgaaatttcaccatttttcataatcaccacttgatcacacacctgctctgcatcgtgcaaaacatgtgtagaaaacagaacggccatatgctttttcagctcccgcatcatgtccagcacctcgaaccgtcctgtcggatcaagcgcagacaccggttcatccaatatcaaaaacttcggtttatggagcagtgcctgtgccagaccgagtctttgtttcatgcctcctgaatagcccccgatctttttgtgcgccgcttcgtgcaaacccacaaattccagcatctcgccgatttcctcttggcattttctcttcgaaaggccggacagtctccccgcaaatgtcaaaaattcatttgcggtcatccaggaataaaaagctggatactgcgggaggtacccaatcaaacgccgatccggctttttttctcctaacagcttaatgtttccggaggttggcgaaagcagaccggccagcatttgcagagtcgtggttttgccggctccattaggtcctaatagtgcgacacactcattttcattcacgtgaaaactgacattctttacagcttcatgatgcctgtacgatttgcataatgattcaatagacagcatatcggcttacctttgctttctgccgacggtaaaaaacaaaatcggcccaataatattgatacatacaatgattgcagcccacatccactttggcccgtttgtccgctcttcttttatacagctgataagggcaaacaccgccaaagccagctgtaatacaatcagcggcaaaatcatttcccaagaaatattcattgcttgatcccccttttcttccgatccggcctaatgacaaaaaagtaataacaaatcagaggcatcggtgcttgaatcaatccgacaatcccccaaacccatgccatgcgattacgttttttcgcatcaataaataaaaagattccctgcgccaatacgatgagacaagccgcaaccgttatgataatttctgtttgtgtcatccgcgtttcacctcgcattcgccgagatgcctttttttctcagccgcaatcaaaatcggcagcaccgcaagcacacaaacctgaagcacaataaacacagcaggagcttgagtgaaagctaagattgcagcactcacaaccatcagcgcgcagaatacaaataaaatgatctcttgaagaagtttttttctgtattcagctttcatttgtgacagctggtgaagcagttctttttgattcggtatagagggattggctgtttgatcaatttttttccattctgactttaaatgatcagaaagcttttctttattcatcgtcccactcctttctgatttgctggagccctttatgaactctggactttacagtgccttctttgatttgaagcatcaccccgatttcagcgtaggtatagccgtagtaatgccttaataaaaccggtgtgcgcagtttagggtccagctttgaaaacagatcgagcgtttcgctccactctgcccctttcgccgacacgtcccacttgatcttgcggattgtttcctccgtaactgtctgattccgtttccattctctctttctctttttctgatgatcgagatagagccgcgatgcaatggagatcagccatgtggagaattttgaacggccctgaaagcttcttaaatggatgtaccctttcagaaaggtttcctgaacaagttcctcgctgagatcggggtgaagggaaagctttaacaagtatttatataagaaagaatagtgatagtggaaaagggctgtaaacgcctcgtcgtttccctctttcgcctgctggatcagccgctgttcttcatgtgtatccaatgaccgtgatccccccttttttgtttttctgccttatgagacgacaccggattcaaaagcgttcatcttttttacaattcttttcagccattgacagatcaggcttcccggccgtttggctgcatatccttatttgtaaacccccttatagtctgttaagctatgactttatgtcgatttcaaaaaaacatccaatatggaggacgatgcattgaaagtagaaaggcgaacgattgaatatattccgaatgaagaaagacatggtaaagcgaaagatttatttcccgtatggttcggggctaatatgcatatcaccacgttagtgaccggcacgattcccgttgcaatgggacttaatctgttttggagtgttgccgctattatttgcggaaccttaatcggtgccatatttatggcgtctcattccgcgcaaggccctcagctaggcatcccgcaaatgattcaaagccgtgcccaattcggcgtaatcggagcgattcttcccctcttcttagtcatgtttatctaccttggtttcttcgcaagcagcacgattctggcggccggaaccttaagcagctttgttcccatcccgggatcatggagcattataggcttaagcgccttatgttttttactcaccattttcggccatgatttgattcacaaaatgcaaaaaatcctttcttggacctcttttgctgtattttttgctgcaacgattctcatttttcaattgccgattccggcaggcagctggattcccggagcgattgatctgccaattttcttggtggcagtcagcgcagttgcgacgtggcagcttgcctacgcgccatatgttgccgattattcaagatatctgccagttaaaacaccggcttcaaaaacattttggtacagctatgcaggtacatctgtcagctccatctggatgatgctgctcggcgcattgctgacaacctcacttcctgactttacggcaaactcaggcagccagattgtccaattgttcggtcccttctcgtttattatgctgatcattgtgttatttgggcaaatggcgatcaatgtttttaacctgtatggggctttcatgtccacgacaacaacgctggagccatttctgaaattaaaagtcacgcccaaagtcagaatcatcatgatcctgggtgtcacgcttgtcggcacagtcttaagcctactgggacagagcaattttatggagctgtttttgaattttatctttttcatcagttatttcttaattccgtggacggcaatcaatttagtcgattactacttcgtccgccacggaaagtatcaagtcaaagccatgttcgacgtaaacgggccttatggaaaggtcaattggatcaccacaattgcgttcgtgctgtctatcttgctggaaattccgtttatcaatacaagcttttacatcggaccgcttgccaaaatgtttggcggcggagacatcgcatggattatcggcttggccgtgccttctgtgctttactatgcattaatgaaaccgcgtctgaaaaaacgggcggggtatcaagaaaagctgtcttctctctgaagacagcttttttatcattcaaatcgtttccacacgcggggcaggatgtcagatagctcatgagcgagcaacgtatgagcggagtgctcgtccgtccagagctcggcgcacgcaccatgcaaatagaccgcgtttaatatggcgtgctttggatcttcatggcagcagagcatccccaatatcatgcccgtcagcgtgtcaccggttccgcccttggcgagcgccccgtttccagttggattgagccagcagtctccatcaggaaacgcgatgacggtttggtttccttttaacacaatgacagtctgcagctgagccgcccattcctttgcatattccgctctttttttctgcaattcgttcacgggcacccctgtcattcgggaaaactcgcccgggtgcggcgtgaggatgacgggggcctcccgtttcggatatgtgcgcttcgccagcgctccggcatccaaaataacaggacaatcagccgtaagcacatgatcgactgcctgctgtacgctttccgtttgcggaaggcccggtccgatggcaatggcccggtacgtctcttcaagctgagcatccgccgcctttttccagccgtcacgccaataggtcgcctcgggcaaaacaggaacaattagcgggattacgctttctgatgtaccgatgacaagcttgccgagaccgctccgcatggccccaagccctgcaagcagcgctgctcccggcatgtcgtcacttccagccagcagcaaagccgtaccgtacgtgcctttatggctctccgcatctctttcaggaagcgtggcccttacatgctcttccgtccaaaatggaacattcatctctatccctcctctgctttcttttcctatttttcctgtcccttttctttttcaaacaaaaaagacagccttttagggctgtcttttattttacaggaacatcaaggtgatacaggcggcgatatcgttcgtttgccgccagcagctcctcatgggttccttccatttctgttttgccgttttcgagaaatacgattttatcggctgcttccactcccgcgagatggtgtgtaatccataaaatcgtttttcctttcagcacctcaaacaccgtttccatcaattcacgttcggtaataggatcgaggccgactgttggctcatcgaggatgatgatcggtgtatcctgcagcaaaatcctcgcaagtgcgatccgctggcgctctccaccggaaaaacggatgccggtttcttgtacagaggtatgatatccatcaggcaatgactcaatgtagtcatgcagcttgacctgctttgcggcgcggcgcacatcctcgtcgcttgcttctccgtttccgagcctgatgttgttcaaaatacttgtatcaaacaggtgcggtttttgatttaacacggccaccgcatccgcaatctgatcctttaacagcgctgtctccactccgtttaacgtcacagaaccggagtccggtttcaaggcgccttcgattaatgcaagcgatgttgatttcccagagccgcttcggccgagcagcgccattttttctccttggcgcagcgtaaaggaaaagttgtgcagcacttggctgctgttgtcataagaaaacgtcacatcacgaaaggccaaggtgacatcttgaagatcgagcatttgatcccctgattcagtttgtgacgcctccagctgaggagccaccttgttcatgcgtctgatagaatcctgatagcccggcacttcgcctaaggcatccgaaagcggcaaaaaggcttccgtcaacggaaataccactagcacaaaagcggcaatcatcgttttagcgagctcgccgtccgcttgctgtcccgctgtccaaaacagcatcatcaaaataaggccggcgacaaggcattgcgcaacaaagtcccgccatcttgtaaagcattgttttttccgttcaagctcaaaccaatcatgttcctctttttcataagcatcaataaaagcatgccggcgtccgctgaacatccagtcgctgacacccatcacagcatctgtcagacggctgtacagcgcattccgtccgcttttcagcttcgcattcttcgctctcgtcacgagcaaagacacaaccggaaacaatacaacaagaacaaacaaatacagcgcaagcaatatggcaaacggccaagagaagaagccgagcgctatcactgacacagcatacaggagcaaggctgagatcgcaggaaaaatcgtttttaagaatgcatcctgcaaatgctcaatatcctcagacaaaatgccgagcatatcccccgtgcgaaaacgggaacgcagcatcaaagcacccggctcaagcatattgtaaaggcggacgcgcatgtcggatacgattttcaaaatgatgtgatgcccgacaagccgttccacatatcgcgacacagaccgcgcaatcccaaaagtgcgcactgcgacaatcggcacataaatgagcagaatgttttccggccttgtcgccgctttagaaatcaaaaacccagaggtgaacatgagaaaagcagcagaaaaaatcgtcaccgcgcccaaaaagataaccagaacaaacaggcgggcattttgcttgatatacggcaaaatccattcttctttcttcatgctctttcccccagttgtgccttcacgagtttggtatacacaccgtttttctccagcagttcattgtgagtcccgatttccgcaatcctgcccccgtccagcacgataatttcgtccatatcgagcatccagtgaaggcggtgagtcgcgagaaagacgagcttatcctcaaataaatccagcatcgtttcttttatttcatattctgtttcgatatcaagatgggcggtcggctcatccagcagcaggatcggacggtttcccaaaaaggcgcgggccagcgcgacacgctgtgcctggccgccgctgagcgcccggccgccttccccgatccgcccctctaatccttgaggaaggctatccaccagctccgccagtccagctgccgcagcagcacgggctgtatcctctgccgaagcgcttggatggtagaagcgaatgttgttgccaagcgtatcatcaaaaatgtacggatgctgtggaatgtaaagaaggttcttctgccagctgccgtcctgcaaatgggaccggcttgtaccattaacctcaatcatcccgccatccggctctaaaaatccgccaagaatatcaattaatgttgattttccggcgccgcttgcaccgataataccgatttttttcttgcccttgaatgagagatgaatatcagacaccgaacggccgactgacacgcctgacagcttcagctcatcctgatcagaccaagcctcgagctgaagcggcgtctcttctttaaaaccaggctgcgacaaaatctcttgaatggtttttcctgcttcctggccgttcagcgttgcatgataatcattccccacttcccgcaccggcaaaaaatactcaggcgccagaataagcgccgttaaagcagggccaagcaaaatatcgccgtcaatgaggcgcaggcccagaaatactgcgactgtcgccaccgacagcatcgtgaaaaaatcgagggcgaatgatgacaaaaacgccacccggagtgtgctcatcgttgccttgcgataccgctcactcacatagaaaatatttttgctgtgtgacttgctcaaacctaggaaacgcaatgtctccagcccgcgaagagaatcaacaaaatgattggaaagtctctgataggatttccactgacgatccgcttttctctgcgcgacaaggccgaggagaatcataaagatgatcagaatcggcatagcagcgactaaaatgatggctgatgtccgatcctgaaaaaacacataaatgacaactgccgcaggcacaatcgccatgctgaccattttcggcagaaacagctccaggtagcggcggaactggctgatgcctcccatcgccagcgtcaccatttgccccgtcccctctttctttgcaaagcgggggcctaatcggaacagctgatcaagaaaacttttcctcaaatctgctcctgtccgggcggcgtattgatagacgattttctgtcgcgccaccgtcaccccgtgccgggcgataaaagcgatgaggaaaaagccgatcatcggaaaaagggaggtaatgcccttcccgttgaacagtccggttacggcctcactcagccactctgcctgcataataatggcggctgtctgaatcatcgttaaacaagtaatcaaggtgagaatccgcttcattcctttatatcgaaacaggtcttttcccattaataagtcataggctccttatggctgacgcgcttccggaagacataatagctccagatctggctgccgatgacgaacggcaatagcgttaatgctgcaattgacatgactttaagcgaataatctccggaagaagcgttagctactgttaaatcgtatgcgctatgaagcgagctgaccattacgcgagggaatagggaaataaagatcattcccacggtcagcgccagaccagcgcctgtcatcccaaatgtccagccgtcttttttcttacgaataaatacagccgcgagcataaagcagatgacaatcaaaacagcgagcggaatggtaatctcgccgcggcgtgtaaacatgtctgtctgatacgcagaaagggccgcgaaggcaagaaccgctacaaaaacaacacccattatcttttgcgccattttccgggcgcggttttgcaaatcaccaatcgtacgcagcgtgataaacattaatccatgctggaagcaaagaagcgttaccgtcacaccgccaagtatagaatatacattgatataatcagaaacatgtgcgtgaatgttcatgtcggcatcaatcggcatcccgcggaataatgtcgtgaacagcacaccaagcacaaacggaggaatcagactgccgaagaaaacgacccagtcccaaacctttacccattttaaatgatccaccttgccgcggaactcaaacgcgaccccgcggcccattaacgcaagcagcactatgacaaacggaatgtaataaccgctcagcatcgttgcataccagtttgggaatgccgcgaaaatggcgcctgcgccagtcaaaagccacacttcattcgcgtcccagaacggcccgatcgtgttgatcagcactctgcgttctaattcattatggccaagaaaacgggtcgccatgccgaccccgaaatcaaagccttccaaaaagaagaaacctacaaacaatacggcaacgagtataaaccaaagatcatgaagagatgccatggtatacctcctgactaaatggatctgttgatacaggaacatcatgatgatcactatgctccgcaccttttttaatctcacggataaacaagaagacaagcagtgcaccaagaatcaagtacatcacaccgaatgcgatgattgagaataacagggagcccgctgttacattaggcgacacggattgagcggttgtcattaaccccataaccgtccaaggctgacgtccgatttctgtcataatccagcccgcggagttcgcaagaaacgggaaggaaatcaacgcgatcatgatgcgcaaataccatttgctgttttcaagctttttgcggcggtttaaccaaaggccgcctaacgcagcaagaatcataacaacacctgctcctaccatgatgcggaagctccagaatgtcgttttcactggcggaatgtagtcgccttttccgtatattttttcgtactcagcctgaagggttttcatccctttgacacttccgctgaatttctgataagccaagtagctcaaggcataaggaactttgatttcatttgagcttttttcattttttgtatcgatcgtcgcaaaagcggtccaagcagcagggtcaccgctgtcttcccatagaccttcactggcagccattttcatcggctgtgattccatcaagtgctcagcctgcatgtgtccgctaaggccgacgccaagaccggcacaaagaccgacgatcattgcgagtttaaaagattgcttaaagaacggcacttcttttttcttcagcagtttaaaagcactcactccggcaataaagaaagctccagtggcaagcgcaccgaaaataacgtgcgggaattcaacccaaagctgagggtttgtaatcaacgcgccaaaatcattcatttccgcgcggccgtttttgatcgtaaaaccgaccggctcctgcataaaggagtttgctgttaaaatccagaaagatgacatgatcgttccgaatgatacgagccatatgcagagagcgtgaattttcttcggcaggcggtcccagccaaaaatccataatccgataaaaatagattccatgaaaaacgccaataatgcttcaatcgcaagcggagcgccaaatacatctccgacaaaacgggagtaatctgaccagttcagtccaaactggaattcttgcaaaatccccgttacaacaccgactgcgaaatttattaagaataagtgtccccaaaactttgccattttgagatacagttcatttttctttacaagataaagagtctccatcaacgcaaccataaacacaagcccgatagacatcggcacaaacaagaagtgaaacaacgttgttgatgcaaattgtatgcgggctaataccaattcactcatgctttctcctccatttccggttaaaactgttaatttgctcactacttcacaaatagaaccgagactttgatcagtaattcacaaaatagacgaaaaaaatattgttcaatatttcacaaatgtgtcaaaaagtcgtccaatatgagacaagattgccagactgaccaaatgacacaatctctgactggttcatattaagtactttacaacgattcatttcaaaaataaagcctaaaatacctaaaaagtcccgccctatgtgacggatttttgtctattttgttgcttatttatgtcggctgctaggataaatgaccctttattatcgtacatcaacacatcgttccttgcgaacaaaatgcttgccctgcaccagcactcgtttctcagcactccgtcataaacagattttaggcaggatgcctcttttcatttgaaccggcaagtggagaaaagttgaatagtaaatttttaatatattaataatttcaattttttagtatacttaacatagtgaacaatttcactgcatcaagaataggggaggtttttcaatgggagagcttcaaacacacatgcaattgcaaacggatacaattcacgaaggggttcgaaaagagaattggtttgcgaaagccatgaatataaaagtaggcatcataccgcttcctgtgtatgccttgctgtttatattaatcactgtttttgttatgcatcacgatgtaaaaagtgacattttgacatccattgccgtcatggcgtttttcgggtttacctttgcccaaatcggcaaatcgataccgattgttcgttctatcggcggcccggccatcctagctacttttattccgtccgctgtcgtgtactatcacctgctgcctaatgatatcgtcaaatccaccacagaatttacagaaaactcaaactttctatatttgtttatcgccggtattgtcgtcggaagcattctcggcatgaaaagagaaacactcgtaaaagcattcatgaaaatctttattccgcttattgtcggatctgtcacagccgctattgtcggactggctgtcgggacattgctcggactcggatttcagcataccctgctgtacattgtcattccgattatggctggaggagtcggagaaggcgctatcccgctgtccatcggatattctgacatcatgcccatttctcaaggggaagcgtttgcacttgttctgccatcgattatgctgggcagcttgtgcgcgattattctagcgggattgctgaaccgcatcggaaagaaaaaaccggaatggacaggcaacggcaaagtggaccgctccgaagaagagtcccctgcgctggaggaatctcaaagcggacaacaaatgttcaacctttctttatttgcgtcaggcggtatccttgctgtttctttatacttagtcggcatgctcgctcacgattttttcggttttccggcacccgttgccatgctgttactggctgttctaatcaagctgttcagattggtgcctgcctcaattgaaaatggcgcgtttggagtgtcccgctttttttcaacagctgtgacctacccgcttctctttgcgattggggtatccatgacgccgtgggacaagcttgtcgccgcttttaacctcagtaatattattacgattctgtctgtcgttgtgaccatgatggccgttggcttcttcactggaaaatggctgaacatgtatccgattgaaaccgccattatcaatgcgtgccattctggacaaggcggcacgggtgacgttgccattttaagcgccgctgaaaggcttgagttgatgccgttcgcccaggtatctacccgcatcgggggagcgatcacagtatccttaaccttattgctgctgcaccagttttattgatccccgcaagcaagttcttcgtcaaacgaaagagcttgcttttttgcatgtccatatttttgcaagttcccatcccatgctatagtaatagttggaaatactagatagaaaggaatctggcatgcctatgggaactcatctatttctctttatgcttctcgggctgggattttatttgatatcagccctagctgcaaaactcattccggccatagacttctggattgatattgttctatgggtcggcgctgcagtttacatcttctctcatctctcattcatggacggcattgtctcactcgcgacaatgttctactgctattggaccgcaatggatctcattgtttcagagcgtgtggaaaaaccttcgggagactggcaggaaatcgagctggccagaaacaaaacacgtctcctgtcagacattacgctgaccgccattgtgtttgcaggggctgttatttttttcatctatggacctgacccaagccctctcaaatatgtgatccttctcggcatgatctccggcggaggggcactggtgaagcgtatactgaatgttttcagcgtaaaggttttttattcagcagccttagaaaaattgcatatcagctcacactatgaaacccgtacatacccgctttccgatttgaaggacattcagcttgaatcaacagctgatctcttaaagctccatccgcttctgacgatgtattcatcacgtttagatttgacaacaagctttcagcaagtcattaaactgtctcttcccggcgaaacactgtttctgacggtgaaggaaccgcaaaaatggaaaacaattcttcaggaatacacagatgcaaaaaacaatgtggacaatgtgatttctgttttgccgttttatcatagaaaaaatgtgaagcggctgctcgggaagctttattttgccgccagcgtaaaaggggtatccgcttacgccttattggtgctcgcgttatacgcatcacacgcctctccatgggtcatggctgttgccgtaatcctatattgggtattcaacatgtatatgtcagaccgtgtgttgcgggcagcgatggacgccaagccttgtcatcatccgcatgtacaggcagcggccgatatgattttccgatcggccggcatttcccatgtccgcatatacgaaacggagagtgatgattacaacggaatggcagtaggcatgaatgtcgggaggtcaatggtcatcctgacaagcgccacactaacacttccacagcgtgtcatcgaaggcattctggcccatgaggcaattcatatcaaaaaacgtgacgttctgtcatcacagcttttgcgttttctatatcttggagctgtcgttgggattttcctcttgtttgagcagcatatcacccatcccgaggcccacaaaattgcgctttgggctttcattatggcaatcattatcctattccagctctatcaatccttttgttcacaatggatggaggtgcgtgctgacaaccttggcgcatccttgctggagggcggttacaaacaaatggctgaagccttgaaaatcttggcggttcagcaggatgaggacatacagaaacaaagtgcctacagctctgaagccggtgaagacgagcttcaaattgactctctcacccgtgataaaagctggtttttcagattgattgattttcagttcgctcctcatccccctatgtattggcgtgtcggcactttattgtcaaacaaaggacatggggtgctaaagcgctggctcagagaccgcctgaaagaatcgatcactttgaaatgaaaccggtcagcgtttcatccgtataacagatatggtgaaaaaagggagtgaccagaagtgatagtgatcttattgataatagctattattgtttttctttcagtcattcagccgcagccatcggataataaaatccgccagcaggcggacagcgggtatttcggttattcagatcatagctcgcaccatgatggattcggcagtgacggaggtttcagcgattccggctgtggcggcggagggggcggcgattaaacgccgcctttttttatttcattgattcgatgtacgcaccaaaagccgagcccgacatgcctggggacacgcgcacacgatggagggcatacattccctggtctctcgaagccgcgcccggttctgtcgtcacgcccatttgatagcctgttttttcagcggccttcagcgtctcctcattgtagcgccctaccggatagctgatgatggtggtttgctgatgaaacatgtggtcaaacagctttttcgaatccgccatctcactttgctgctgttgaggcgttaatccgttcagctcaaggtggtcaatcgtatggctttcaatcgatatgccgtgctgtgccatttccttcatttgttcctctgtcagatgatgcttatgtccgatcgatttgccgatcataaaaatcgttgccttcatcccgtactttttcagcaccggatacgcatcttgataattgtcggtgtacccgtcatcaaatgtgatcagcacgcacttctcactcggttttttatcctgcgtcagcatgagatatgcctctttcggcgttaatgtctgatagccgttatcatgaagccacttcatatgcgcctcgaattctttctttggcacacggaggctgtttcctgaagaaatgctgtggtacatcaaaatcggcagctttgccggtttctctgttttgatccatgcggatgtatcgtcttcttttttctgaacttgtactgcctttttttccggtttcttttgttccgcttttggcatcggctgctctgcattcgcctcttgatcagcgcaagccgcaagagccaaacagctgcccaaaagaaagatgcttaaaaacaatcgtttcatcgttctcctgctttctgtctatttcttcctcctttttcatcggtttgattctgagattttcaatagcaaaaaaccggacatgtctccatgtccggtttttttgatcctattgaattctcacttctgtctcactgtcaaagaaatggcctttattcatatcaaatgcaaccgtcagctcatcgcccgattgaatatcgaggcgggcgtcgatccgcgcaataaagtcttggttgtctatctgcgaataaatcataatttcagaaccgagcagctctgcaacattgattttcgccttaatcgaagagttcttatatgattccacgacaatcaattcatcatgtatatcctcaggacggatgccgaagatgacctctttgccgatgtagcctttttcacgcagcactttcatttttccttccgggacggttaatgccgcagaaccgattttgattaagccatccgtgagctttcctttgaaaaaattcatcgccggtgatccgataaacccgccgacaaagacgttttcagggaattcatatacatccttcggcgtcccgatctgctgaattttcccatctttcatgactacaatccgtgtcgccattgtcagcgcttctgtctggtcatgcgtcacataaatcgttgtagtctgcaatctctggtggagcttaatgatttccgcccgcatttgcaccctcagcttcgcgtccaggtttgacaaaggctcatccatcaggaacacctttgcatcccgcacgattgcccggcccagcgcaacccgctgtctctgtccgcctgacagcgctttcggtttacggtgcaaatattcctccagcccgagaattttagcagcttcctctactctttttttgatttcaggcttcggcattttccgaagcttgagcccgaacgcgatattatcgtagaccgtcatatgcggatagagcgcgtagttctgaaataccatcgcgatatccctgtcctttggcgctacatcattgacccgttttccttcaatataaaaatcgcctttcgaaatttcttcaagtcctgcgaccattcgcagcgtcgttgatttcccgcagccggacgggccgacgaatacgataaattccttatcggcaatatgaaggttaaagtcatcaaccgccggttccttctgatcataaaatttataaatgtgctccatccgcaattcagccatctaacatccccctttgttattgtaaacgctttcttatattgagtgtaacagcaattccctctcgctaaaatgggcagcgttcataaaatcatccagccatttttcgtgcatatttccaatttattctgaactttcattttgcaggcagataaaataggcaagaagcgcgcctttgtacgatttgatatctatccctgaccgctcaataaatttatcaatccgatattgcaggctgttgcgatgcagatgcagctttttcgctgttaatgtgacgtttgagttgttttcaataaacagcttaatggtcttccttagctcagcttcacttccaaataaaagctcagcttcttcagagagcagcgtttccagtttttctttttctgtttctaataatagaaaaggaaagatcatctcaaaggtcacactctgcacctgaggcagccgtttttcagcaaacaggaaatacgcctgttcacgagtgtaatgttttcgcagacactcatccggctcgtaaaatcttccggcgtaaaaacggacactgaagtagaaatcactttcaagaacttttgcgagcgattccagttcgcccttcttcgccgccgcttcactttcctgctcgacaatcacgcctctgtcctcatgaatccacacaatcacaaaagacaccggccaaaaatggcgaaccgcttctgtaaaggacgtcctttctattttgccgaataaatgaaagtgaacaaatctcgtccgtttctttatgtacgccggcaattcccctctggaaaaaaggaacgaaaaccacttgttttcctcaggtgatttcatagacagttgattgccctcatccgcaggcgtcaaaaatgattgcagcaccaatacttctttttcactgatctctgttttcggaatggagatatacctctgattgctctcatcaaaaaaacatagacagccttcccttatgcaaagctcctcagacacaatcgaaccgggataaatagccagcagcgatttcatagagtctcctctcttatgtaaggatctgtatattcagtataaggcgaaacacacatgttctccactaaaaaagagtatatccggtatagatagacgagaaactgaaagggaaacctcattcgtttacatattggcttcagcggaaatagaagaggatatgcaggaccaaaggagggccatcttatgagtttcgaaacgttaaacaaaagttttatcaatggaaaatggactgagggagaaagcggacgtacggaggacattttgaatccgtatgaccagtctgtgatcacaacagcatctttggcaacgggcaaacagctggaggatgcgtttggcattgcacagaaagcccaaaaagagtgggccaagagcacgacggaagaccgaaaagccgtcctgcaaaaagcgcgcggctatttacaggaaaaccgtgaagacatcattatgatgatcgcccgcgaaactggcggaacgatcattaaatcaacaatcgagctggaacaaacgattgcgattttagatgaagccatgacgtatactggtgaattaggcggcgtcaaagaggtgccatccgacattgaagggaaaaccaataagatttaccgccttccgctaggtgtcatttcatcgatttctccatttaatttcccaatgaatctatccatgagatccattgcgcccgcaattgcgctgggtaacagtgttgttcacaagcctgatatccaaactgctatttccggcgggaccatcattgcgaaagcgtttgaacacgccggtcttcctgccggtgtccttaacgtcatgctgacggatgtaagggaaatcggggacggcatgctcaccaatccaatcccgagattaatcagctttacagggtcaacagcagtcgggcgccacatcggtgaaatcgccgggcgtgccttcaaacgaatggcacttgagctcggcggcaacaatccatttgccgttctttcagatgcggatgtcgatcgtgctgtggatgccgcgattttcggaaaatttattcaccagggacaaatctgtatgattatcaacaggatcatcgttcatcaagatgtatacgatgagtttgtagaaaaattcaccgcccgtgtcaaacagcttccgtacggcgatcaaaccgatccgaaaaccgttgtcggcccgctgattaacgagcgccaaatcgagaaagcgctggagatcattgagcaggcaaagacagacggcattgagcttgcggttgaaggaaaacgcgtcggaaacgtgctgacgccgtacgtctttgtcggtgcggacaacaacagcaaaattgcccaaacggagctgtttgccccaatcgcaaccattattaaagctggcagcgaccaggaagcgattgacatggcaaatgatactgaatacggcctcagctctgcggttttcacttctgatttagaaaaaggcgaaaagttcgccctgcaaattgacagcggcatgacccatgtcaacgaccagtccgtcaatgattcgccgaatattgcctttggcggaaacaaagcaagcggtgtcggccgtttcggcaatccgtgggtcgtcgaggaatttaccgtgacgaaatggatttcgatacagaagcaataccgcaaatatccgttctaaatgaaaaaatccctctgtttcaagtacagagggatttttctttatttagatatatccacaaacccttcgccaaacacatcgcgtacgtcatgaacgatcacaaacgcttttttgtcgcagcttctaatgatttttttcagcatagacagctcctgtttgttaatgacgatatacaaaatctcttttgattggcccgtataatttcccttccctgataaaatcgtcacgccccgatccatcaaggtattcacctgctctgcaatctcactcttattttctgaaatgaccgtaatggcttttttcgtattcaaaccttcaataatgaagtccatcactttggtaccgatatacagcatcacgatcgtaaacatcattttttctgcaccaataataaaataagagctaaatactacgattaaatcaaaaaacaagagtgcatagctgatattccagtctaaatatttattagcaattctggccagaatcgcggaaccagccgtcgtcccgccgacccggataatcatgccgatcccgactccggcaaatacacctgcgaaaatcgtattaatgatcaattcatcagacggaatgctccacccatgtgtcagatgaagaaaaagcgaatttgccgcaaccgcaatgatcgtataaaccgttgtttttccatccagaaacttgtagccgattaaaagcaaaaacgcatttaagataaagttcgtgacaccaggagaccattgaaacagataatacaatatcagcgtaatcccagtgactccgccttccccaagatcattgggaatcgcaaataaattaaccgcaagcgcgaagaaaaaagcgccaatcacaagcataagtacatccagcattctctttttcatcacgaaaacactccttctcattgttctgttctactagcaaataaaaaaacccaggagaacgctctcgaaaaagagcagaaactcctgggcttttatcccaccgtgtcataacagccaatctgctatgtgttttctctcggtcacagtccaatttgcattgcggaaccctagaaaaccactgtttttatcatatccttttcactttccaatattagcattataagggacggttcgaattggttcaaggggtatttgcggagttttcatcagataagctggaagaaaaaacgatttatctattaaaaaagaacagatataaccgataagaaaaaaagcatatattttacaagtaaatgtaactataaatgataataattatgagaaattcataattttatattgactaagtgaaataatataggcattatagtacatatgtttcgtacattttattacataggaggaaatataatggcaggaaaactagtaccctgtaaagcttgcggtcaagaaattgcaaagggtgtaaaaaaatgtcctaactgcggtaaggatcaacgtaacttttttatgcgacataaaatcattacgtttattctcgcagttgttgtcatcattattatcggtaatatgattggcggcggaggcggttcagaagccacttccaaaacatcaagcggaagcaaagcagaaactgaaaaaacatacaatatcggtgatactgtaaaaactgaaaaaactgaagtgacagttacgaaggtagaggacagagatactgtcggtactcaatatgttgaaaagaaagcatctgatggtggtacaattgtagctgttcaatatacaattaaaaacgtatctaaaaagccaataagttctttttcaattccaactgttaaattagttgatgctgatggtacttcttatgattctgatattgatgcttctgtaaactatgcaactgagacaaaagttgataactctaaaattttgagtgatctaaatcctaatattaaagtaacaggtgtaaaagcatttgaagttgacaaggaagcttatgcaaaaggcacttggaaactaaaattcagtaatgatgttattgtgaaaatcaaataacagctaacaagggtgcctgttcaggcacccttgttctttaaaggccttctctattgagaaggcctccattcttattccgcactcttatacccattcacattagaagactgccatctccaggaatcagcacacatttcctcaaggccgcgtttcgcttcccagcccagttcccgcttggctttcgcaggatctgcaaagcatgtggcgatgtctcccgggcgacggtccgcaaaacggtacggaacctctttccctgacactttttcaaaggctttgaccatttcaagcacgctgtagcctgtgcctgttccaaggttgtatgcatcggctcctgtagagttcaatactttttccagcgccttgacgtggccttctgcgagatcaacgacgtgaatataatcgcgtacgcctgtcccgtcttttgtcggatagtcatttccgaatacgcttaattgctcaagcttcccgactgctacctgtgccacatacggcataaggttattagggattccgttcgggtcttcaccgatccgtccgcttggatgcgcgccgaacgggttaaagtaacgaagcagcgcaacgctccactcattgtcggctgtatgcaaatcacgcaatatttgttcaagcatgagcttcgtctgcccataagggtttgtcgcacctaatggaaagtcttccgtaatcggcgatgtttccggaacgccgtacactgtcgcagatgaactgaatacgattttcttgacgccgaatttctccatggcctcgcataaaataaacgttcctgtcagattgttatgataatatttgagcggaatcgccacagattcaccaactgcttttaacccagcaaaatgaatcacagcttcgatttcattttcagcaaaaaccgcatctaccgcttcccggtccaataagtccgcttcgtagaacgttaaatcttttcccgtaatccccttgacacggttcagcgcctcagccgaactgttggacagattatcaagaacaacaatctcgtagccgctgttcaataattcaacacatgtgtggctgccaatgtacccggcaccgccagtaacaagtattgccatgatgtaaccctcctaaaaaatgacctgttttcattatatagtgtttaaaaccggtccacatccatttttaagaagtttaatcgtttattaatagttttttcatatattatcagcattttcatacctttatgcagcgtgaacaagtatagcagctgaaaaatcaatctgccggttgacgtttttctttccctttttcgctatgcttaatgtagaaaggatttgatgacatggcgatgagcccatatatttttattgtattgattcttattattttatcgatgtaccgagagagagctgtcagacccgggaagttgctgatcattccgctgctgctcttatggggcgtatcagcatcgtttcagccggcgtattttcattccgtattacatgtggcgatcagcggcattttattattaatcgggctggcctgcgggtttggcattggaaagatggtaaacgtgcggattcacccggaaaccggaaaggtcacttcacgcggctcacttgggagtgttatcctcattctagtgatactttctttgcgcatggccgcgagaacatggctgcctgagagcaacgagatgtttattgccattattcattctatgttcttcattcccctcggcaccattacagcccgtaacattatgctttataaagcatacagacggctgaccgctggcaaggtatccattcaataactgaaagaaggaccagcatgaacagacaaactccggctcggcactactacaagaagcttgtgccgagccttattctcattttgaattgcatacaatttttatctcacccagccaaagctgatcccattttgttggcatttgtatttgcggtgtacttagcattcatttgggtcattccctatgtggcatccactgctgttagtttgtgcatattcatcggactctggctcctgaccgatttcttttgggctgtttccggccaagagcagggtgccgcctattttttgattgtatttttaatgatatatgccgcctttagactcccttcacggctatccttgatcttcacagcatgtttaattggaggcaacatattactcctatcctcacaagggggaagcttgaataccatcatcagcaacatctcgatcatgctcgggctgtacgtcctcttctcctccatgcgtttcagacgagaagcgagaagggaggctgaacggaatcatgctgaattggcaaaaatgcatgtgcagctggagcatgctcataaagaactccagaaagcgcatgcagagctgcaggaggcttctgttctttcattaaggtacgcggtccttgaggaacgtacaagaattgcccgcgacattcatgacagcatcggtcacgagctgacttctgttattgttcagcttcaatcccttccctatatccttaaaagcagcaaggaggattcagaaaaagtcattcaaaatgtactgagtgtcgccagggaatgtcttcaagaagtacggtctgtcgttcaccaaatgggccgtagtgaatcgatggtggggcttaccgctttgcgggggctcattcatcaagtggaggaacggagcggcttgcacgtttctttagatactgccggactatcagaagagtcttggcctccaaacgtgagcgaaacgatctaccgcatcttgcaggaagcgctgaccaatatcattcgtcacgctgacgcttctcatgcggcggccgtcatttctaacgacaagtcccatctctatatcacaatcaccgacgacggacaattcaccggcagccttacttatggatttggcctgacaggaatgaaagagcgcgcagaaaaagcaggcggttcccttactttcagtgccgtacagccgagcggcctgaaaattgagctgtcattgccgctcatgacaacgaataaggagcaaaaagatgaacaaagataacatacgcgtcgcgcttgccgatgatcagccgcttgtgcgtgaaggcttccgctacgtcatcaacgcacagacggatatgacggtttctggcgaggccggcgacggtcacgatattatagcactcgcaaaacaaacaaaacccgatgtcatcctcatggatgtccagatgccgcgttgctcaggcatcgaagcagcgaaagacattatgtccgcacttccagatacaaagatagtcattttaaccacctttgacacggaagaatacgtatttgaaggcatccgtgcgggagcagtaggctatctgctgaaggatacacttcctgaagagttgatagatgcgattcgcgctgcggccagaggcgaggcgattttccgtacagtcacagctgctaaaattatcagtgagacatttcaggcgaagcaacagccccatccagaagaactggcagagccgttcaccaaaagagagcttgaggttcttcagcaaatggcctacggactgagaaatgaggatattgctgaaaagcttttcgtcagtgaaagcactgtgaaaacccacgtgcaccgcatcctgcaaaaatgcaatgcccaagaccggacacaggcagtcgtttttgccattcgaaacggtattgtgcaatagaaatctctcatcccgccatgctaaaataagacaaaggagatgattggaaatgaaagaagaaatcattgaacggtttactacatatgtaaaagtcgacacacagtccgatgaatccgttgacacttgtccttccacacccggccaattgacattaggaaacatgctcgttgatgaattgaagtccatcggcatgcaggatgcagccattgatgaaaacggctatgtcatggcaactcttccctccaatactgaaaaagacgtgccgacaatcggctttctcgctcacgtcgacaccgctacagactttaccggcaaaaacgtgaatccgcaaatcatcgaaagctatgatggaaaagacatcgttctcaacaaacagctgcaggtcaccctgtcacctgatcaattccctgagctgtctggctataagggccatacactcatcaccacagacggcactacccttctcggcgcagacaataaggccggtatcgctgaaatcatgacagccatggattacctcatcaaacaccctgaaatcaagcacggcccgatcagagtcgcctttacgcctgatgaagaaatcggaagagggccgcacaaatttgatgtgaaacggttcaatgcttcctttgcctacacggttgacggcgggccgctcggcgagcttgaatacgaaagcttcaatgccgctgccgcaaaaattacgattaaaggcaacaacgtacatcccggcacggcaaaagggaaaatgatcaactctgcgaaaatcgcgatgaagctgaacagcctgctgccggcagacgaagcgcctgaatatacggaaggctatgaaggcttctaccacctgctgtcgattcaaggagacgtagaggaaacaaagctccactacattattagagactttgacaaagagaatttccaaaacagaaaagaaacaatgaagcgtgtcgttgaagtacttcaaaacgaatacggacaagacaggattctgctggatatgaacgaccaatactacaacatgagagagaaaattgaacctgtcatcgaaatcgtcaacattgccaagcaagcgatggaaaacctcggcatcgaaccgaagatttctcccatccgcggcggcaccgacggatcgcagctgtcctatatggggcttccgacgccaaacatctttacaggcggggaaaatttccacggcaaatttgaatacatctcagttgacaacatggtcaaagccgtaaatgttatcgttgagattgcaaagcagtttgaagcgcaagcctaatgccaaaaaaccagtccaaaaaaggactggcttttttgtgtgaaagtgaaacattttaaacgcgtcctccgtaaaacaagtattaacaaatgaggaggaaaaacaatgacaaaacatgcaatcgctgcaaagagtctcttgaaaaaatggatcatttccaggccgcttaacatgcaaaagaaatccagcccatttcaaaaaatcagaaaaatgttcaaacgcttcttcaaataaaacattcaaatcccctaaatacaatccgtattcacccgtaccgcccaaatgctccgtaatttgggttttttgtgttcaattccgcaaaatagggtataaaccaaacaagcaagaaaacagcacccaaaaacaggtaattcgaattacgtaaacttaggttaaaagttatataaaggaatttattttatcgtcgatagtaactatagaaccaatcatcaacgagagcaaacagcgtaattcaagactattttcaggtcatcaggtaatactgttttagagggacagtttcttgttatttattgatttagaattttttgaatactttttggcattttatccgtacaatagagagtaccaaaactttttttgggaggtatgtaatatgatcctatttattatcatcgcattatgcggctatcttcttttttctttcagcaaggacaatcgccgcaaaccgcaaaagacaagccctctgccagcagccgcacctcatcacaacaacctaatcgaccttgacgccatccgccaaaaacgccggatgcatctttcctaattctatatttcaaacgaaaaggctgctgaatcacgcagccttttaaaattgttttgatttagagcctgaaaccttttcgccacatatccgtaatttcatacaaggcaaacccaaaggagacttcagcaatgatcgagttatttatgaaacaaaaaatgttctcatttaaagatgcatttcacatttatgaccgggatgaacaagaaacattcaaggtggaggggcgttttttctcgttaggagactcattacaaatgacagactcatctgggaaaacgctcgtttccatagaacaaaaactaatgtctttattgccgcgctatgagatttcaattggcgggaaaacagtttgtgaggtaacgaagaaatgtaacgtttttcaaaccgaaatttgtgatttccgggcttaactgggaaatcgatggtgatttatggagggatgaattccagctgacggacggggaaaatgtccggatgtcagtgagcaaaaagtggctcagttggggtgattcctatcacttgcagattgcaaacgaggaagatgttctgatttgcactgccatcgctatcgtgcttgatatggttttatataacgatgaagatgaaggtattttctaaaaagcattgacaattgatccaaaagtaataatattaagataattgaaatctgaatatgaagttataccttatcaagagaggtggagggactggccctatgatacccggcaaccgctgtttcaaacagaatggtgctaaatccttaagaacattgtgttcttgcagatgaggcggagatttgatcgttcaagctcttccttacacaaaggaagagctttttacatgctcaatatttcagaaaagaggcgaataacatggctcaacaaacgaatgttgcaggacaaaaaacagaaaaacaacgcaaagcacctttccgcgccgatcatgtcggcagcttgcttcgttccgttccggtaaaggaatcccggcaaaaaaaagcggcaggtgagatgacagcggaacagcttcgtgatatcgaaaatcaagagatcacccgcatcgtggaaaaacaaaaagaaatcggtctcgatgtggtaacagacggggaattccggcgttcctggtggcattatgacttcctggaagggcttgacggtgtggaaccgttcattccggctgaggggattcagttccataacacaaaaacgaaagcgcgcagcatcaaagtgacgggaaaactcgattttacgagccacccagcgcttgctgattatcaatttttacatgagattgccggtaacgcgacgccaaaattgaccattcccagcccaaatatgctgttttttggcgaaaaggcggataaagggatttatgacgatcaagaggaatactttcatgatctggcccaagcgtacaaaaaagcaatcaaagccttctatgatgctggctgccgttatctccagctcgatgatacgtcatggtctctcttctttgaggaaaaaggcagagaggttgtccgggcgctcggcggcgatccagaaacattgccagccatatttgccaaaacaattaacgatgccgtcgcagaccggcctgacgatttaacgatcacaatgcacatttgccgcggcaacttccgctcaacctgggcggcatcaggagggtacgacgctgtagcggaaacgattttggacggcttaaaccttgacggccttttcttggaatacgatgatgaccgctccggaaactttgatccgctccgttttgtgaagcgcaaggatctgcaaattgtgctcggcttgatcacatcgaaatacggcgagcttgaaaatcctgaggatgtgaaacgccgtatcaatgaagccgcgcgttttgtcagcttggaccagctatgcctgagcccgcagtgcggtttcgcctctacagaagaaggcaaccttctgacagaggagcagcaatgggcaaagcttcgccatgtcatcgacattgccaacgatgtgtggagataatctatcattgacagaaatagaaaatgtgtgaataatagatactatcagaaaatttcataaaaaggttttccttatcaagagaggtggagggactggccctgcgatacccggcaaccgctgtttaacagaatggtgctaaatcctttagagcaatgattgctcttgaagataaggttgagattgtcacgcaagctcttccttatccaaaggaagagcttttttacatttgaatggaaagaaggaatggacaacatgtcacaacaaacaacacccgcagaacaaaaatcacttcaaagaaaaaaaccgccgtttcgcgcggatcaagtcggaagcctgttgagatctgagcccgttaaaaaagcgcggctgcaaaaagcggccggcgatattacggctgagcagcttcgccagatcgaaaacgatgaaattatccgcattgtggaaaaacagaaggaaaccggcctgaacgtcgtgacagacggtgaattccgcagagcatggtggcactttgatttcctggaaaacttagatggcgttgagccgtttactcctgagcaaggcattcaattccataacgtacagacaaaagcacgcggcattaaagtcacaggtgatatcgacttttcaactcacccaatgcttgaagattactcatttctccatagcattgccggtgacgcgacgccaaagatgacgattccaagcccgaatatgctgtttttccgcggaaaattggaaaaaggtgcatacaaaaacgactatcaccttttccagcatgatgtatccaaagcatataaaaaagcgattcaagcgttttatgacagaggctgccgctacctccagcttgatgatacagcgtgggccgttttcttatctgaaaaaggcttaaaacaaatcgaagcgttcggaacaacgcctgacgagcttcgccagctgtttgcgaaatcgattaacgacgcgattgcagaccgcccggatgacttgacggtaaccatgcatatttgccgcggcaacttccagtccacttggacagcggaaggcggctatgacgcagcagccgaaaccatttttgacggcttgaatcttgacggacttttcttagagtatgatgattcacgctcaggcggatttgagccgctccgttacgtaaaacggtctgatcttcagcttgttcttggcttagtgacatctaaattcggtgagcttgaaaatccggatgacgtgaaacgccgtatcgaagaagcgtcccgttatgtaagcttagaccagctttgcctcagccctcaatgcggatttgcttcaactgaggaaggcaacaagctgactgaagaacagcaatgggcgaagctccgccatgtggttgagatcgctaatgatgtttggaaataagaaaagaaaaaacacacttgattccctagcggagcaagtgtgttttttatgtcattgtgcggtgtagcccccatcaaggacgacagcctgcccagtgacgcccttcgccttctcgcttgccaaaaacacggcataatccgcaatttccttgacggaaagcagtcgcttttgcggcacaagcggaaaaatgacttgttcaagtacagagtcgtaagggacatttctagttttcgatagatcgctaagctgattgcgtacaagctgggtatcgacataacccggacagagcgcattgactgttatgccgtggggcgcgccttccagcgcccctacttttgtgagtccaatgacgccgtgcttggcgctattataagcggatttccctgcaaagccgactaatccattaacagacgcgatattaatgattctgccaaactgctgttttttcatgatcggaaaaacatgcttcattgcaataaagggggccgtcagcatgaccttgatcagctgttcaaaggtgtctgtcggaaactcttcaatcggagcgacgtgctgaataccggcattgttcaccagaatatccaagcggccgtattgtttttggatgacgttcaccgtatcagcaacttgcgcttcctttgtcacatcatacggaatggccgccgcgtcaaagccttcttctgcaagcttggaggctgctttttcacatgcttccggacggaggtctgaaacgatgacgctggcaccttcccgggcgaattctcttgcgatttcgaatccgattccgccggcagcccctgtcaccaaagcgacttgttttctcatgtcaaacaccttcccattaagaattgagtacagactggcttacagcgaaatcagcttctgttttttcataaacctcttcaattgtgacaccatcctgaagctccgtcagtgtcatgcggccgttcacaaaatcaaatacagccaaatccgtaatcagcctgtgtacgactttctggcctgtcagcggatgagagcatgtttttttcacctttgattcaccatgcttattgacgtgctccatgatgacaacgattcgtttcgccccgttgacgagatccatggcgccgcccatcccttttaccattttgccggggatcatccaattggccaaatcaccctgctccgaaacctccattccgccaagaatagccaaatcgatatgcccgcctcttatcatcgcgaatgactcagcgctgtcaaaataagaggcgcccgtcacttcagtgatcgtttcctttcccgcattgatcaaatccgcgtcttccgttccttccagaggataggggccaattccgagcaagccgttttccgactgaagcatgacgtgaacgccatcgggtatctcatttgcgacaagcgtcggcattccaatcccgagattcacattcatgccgtccttgatttcttgtacagcccgtttgaccattcgttttctcgcttccttcacttggcctcaccctttcccgatgcttgctgaactgttcgtttttcaatccgtttttcttggctcgcgccaagcacgacatgctgtacgtaaattcccggcgtatggatatgatctggatcgagctctcctgcttccacgatttcttccgcctcggcaatcgtgatcttgcctgccatggcggcaatgggattgaaatttctcgccgttttcctaaaaaccaaattgcccatggtgtccgctttccacgctttgacgatcgccacatcgccggtaatgcctcgctccagcacataagtccggccgccgaatgttttatgttcttttccctcggctatggaggtgccgacgcctgtcgccgtataaaatcccggtatgcctgcaccgcctgcacgaattctctcagcgagcgttccttggggaacaagctcgacctcaagctctccgcttaaaaactgccgctcaaaaattttattttcaccgacataggaagcgatcattttcttgatttgcttgttagccagaagcaaaccaagcccccagtcatcgactccgcagttattgctgacaacggttaaatcctttactccctgatctcttatagacaaaatgagctgttcagggatgccgcacagcccaaaccctcccgcgatcagcgtatccccatcatgaatcagtttcgcagcttccttgcttgatgacagcactttttccatattgatgcccctttcgttttcttctacactagaccagtcaggctgtaaatcgcgatcacagcaaatacggcagccgttttaatgagcgtgatcgcaaaaatatcgcgataggattgccggtgggtcaaacccgtcacggccagaagcgtaataacggcgccattatgcggcagtgtatccatcccgcctgatgccattgaaatgacccgatgcatcacctctggcggaatattgtaagcctgaatcgcctgtaagtattgttctgacatcgcgcttaacgcaatgcccattcctcctgaagccgagccggtgattcccgccagcgcagttgtcgtaacggcgccatttacaagcggatcggtaaaagtatgtgaaattccgctgctcagcttatgaaaccccggcagtgcggcgataatgccgccgaacccgtactcggcacccgtattcatagatgccagcaaggcgccgccaattccttcattcagcccttccttcaattgggcaaacacacttctccaatcaaataaaatcgttgtgatgatgccaatcactaaagcaatctccaccgaccaaatagcagctgctgaagaaatatcaagcctgccgaactcctttaatcctatggaagaaaaatcaaatccattcggataccactttggcaggtaaatggtaaaatatttattcactgcaccgacgagaataagcgggacaaaggcaagcgcgtgccgaatcgggcttttgtccggttcagccgcggactcaatcgattcaggagcaggagcattctgcgaatcaaaaccgccatagccttcgccagatgcctgcgcttttttccgccttgattccaaatagagcatcccagctgccagcacaatcactgcgcccatcaagcccagccaaggggcggcataaatgtctgttttgaaaaacgacgtcggaatgacattttggatttgcggcgttcccggaagtgcgtccatcgtaaacgtaaaagcccctaaagcaatcgttcccgggatgaggcgttttggtatgtttgcttcttggaacatgtttttcgcaaaaggatatacggcaaatacgacaacaaacaggctgacaccgctgtacgtcaagacagcacccatcagcacaatggcaagtatcgctctttttgccccgacaagccggacaattgttttcgcgattgatgccgcaagcccggccatttcaacgacctttccaaaaatggcaccgagcaaaaacactgggaaatacagcttaataaaacccgccatcttctccataaaaattgatgaaaaaaaaggaagcacatggcttggatctgtcaggagcaccgcgaataacgcgcaaatcggcgcaaacaatatgacagaaaatccccgatacgccgtaaacatcagcaaacctaacgccaatagaatgatgatcagttccacacacacatcccccgtttccgcgaactagaaagcgtttacaaaaacctgtccgcatcggctgtttccgtcccctttccatatgtacgagaagcgtgggccaactattccgattaaaaaaggaaagctccttttttcggagctttcctctgccattcatttcattcctattaggatatcaacatcaaccgtaatatcggctgttttcatctctttcaggaggctgactcgatctttcggcgccgaccaggcaagcggcgtcatcttgagaagccagtggatcgcctgctggtcaagcgttttaacatagcgcagcctgacaggacggctgtgtgcagcatttgctgcaaaacgctcaacagctgccgcattggaatacgtgcgccttggtgaatcagtatataaaaattgccttaattctattaaatagtcgcttcgcggcactacttttacgagcatgccatcattcttcagcagtctatgaaactctgcataattggacggcgaaaaaatagacagaacaacatcaaattggcgatcatgaaaaggagcacgcgccacatcggcaaccgcccacatctgatctttgaatgccttagaagcttttaagatcccatccttcgaaagatctatgccggttcctatcgctgctttccctgcataatcaaacccgcaaagcgcattcaaatgagaaccctcaccgcaaccgctgtccaggatggtgaatgcctcatgaccagatgtgggatgactgatgagttctgcaatcgcatcatggagcgggtcaaaaaaaccacattctccaatcagcctgctcctcgcttcaaaaagctcggcaccgtaactggttttgaccggcttcgtcagaaagttcacgtagccgtgccgagatagatcaaatgtatgtcctcgttctgtacaaatcaagcttttccctgatgccgcatccatagaagaatcgcagagcgggcatcgaaacatgctgaaatcaactgttcgcttcatgataaaaaacaccccattcattcatttttagataaatgaaaaaggcatagacaaataaacctaggcctatctcaaaaattggccaggtctggcagtttgtctacacctgtcattatctataacgaatgaattggataatcatgaaaaaactccctttctgctgtatgggtttccccatttccattatacaacaaatctccaggatctggaaccttatagtgaagaaaaatcagtactgacatgctggtatcccgccaacatcatatcagcatagcaatccagcatgtttttcctttattttctcattttagaatataaattttattattgtgaaaatagttaaaaaggttgattttcaaaaagtgaaaggataaaatactgctatcatcttagaaaaagacattcttgtatatgatcagtaatatggtctgattgtttctacctagtaaccgtaaaaaactagactacaagaaagtttgaataaatttgaacgagttgaaaaggacaagttcttttctgtttgctcttatttttcacactttctgcacttccagaatttgtgaagaataagagctttttttgtttccataataaccctcataggagttgctatcatgtactttttactaaaccttgtcggtctcattgtgattatggcagttgtattcctatgttctccgcagaaaaagaaaatcaagtggcgcccgatcatgacgttaattgttctggaattgctgattacttggtttatgctgggaacaaaagtcggaagctgggccatcggtaaaatcggtgatttcttcacttggctgattgcttgcgctagtgacggtatcgcgtttgcctttccgtcagtaatggcgaatgaaacagtagactttttctttagtgcgcttcttccaattatctttatcgtcacattctttgatattttaacgtatttcggcattttgccttggctgattgataaaatcggatgggtgatttcaaaggcttcccgcttgccgaaattagaaagctttttctctattcaaatgatgttcctgggaaataccgaagcacttgcggttatccgccagcagctaacggttttaagcaacaaccgcctgctcacattcggcttaatgagcatgagcagcatcagcggctccattatcggatcttatctttcaatggtgcctgcgacatacgtgtttacagccattcctttgaactgcttaaacgcgctgattatcgcaaacctgctgaatcctgttcacgtgccggaggatgaagatatcatctatacaccgcctaaagaagagaagaaagactttttctctacgatttctaacagtatgcttgtcggcatgaacatggttatcgttattttggcaatggtgatcggatatgtcgcattaacgtcagcagttaatggcattcttggcgttttcgtacatggcctgaccatccagacaatttttgcttatctgttcagtccgttcgcattcctgcttggactgccagtgcacgatgcgatgtatgttgctcagctgatgggcatgaaattagcaacgaacgagtttgttgcgatgcttgacttgaaaaacaatctcaaatcccttccgcctcacaccgttgcggtggcgacgacattcctgacgtcctttgcaaacttcagtactgtcggcatgatttacggcacgtacaattcgatccttgacggagaaaagtcaacggtcatcgggagaaacgtgtggaaactgctcgtcagcggaattgcggtatctttattaagtgctgcgattgtcggcctgtttgtgtggtagaaacattgagccatatcccttttcggatatggctcttttcattattgataaatagaggctggcacctgcacatcccggattcccgctgcataaggccccaagtcatactggccgaagacgatggcgatcccgtttgccgtaaagtaaaacattgtgtctctgtttagggttatatcctctttctttacatcagggaaaaacagctcatcgtgttttttgatatagctatataggtaatctctcgttttgctgacttttgttttggtgttcagaatctgatccagcgtcacccgcttttgtgctttcaagtcatagttgaaggactggacagacgttaaaccgtgggcgccccctgaatagatataattgagtgtttgaatgctgagcttgcctgccgcattgtatttgacgctaaaggatgtttgatattccgttttaaagccctgctgttcgcctgcttttttgtttttcaggtattcctgatacgattgttcaatgtaggctttcagctcttgattgattttcttttcaaacgcggcattcccgatgtgatgcacttgtggatacgttaactccttgatctttttgtacgtatgagtgctgacagtcggtgttttcgtttgaactgcgtttagagatggggccgcatatgcaactacggaaaaaagcaagactgcaatccccgcggctttcatcattttattccatttcatacaatctcctcctttgatgtcgttgtttatcattcccttatttaagcaatacacacttttatagactgattaaatcgaaagaagtttctaggtctaacagcatgatttttccaataaaaaaagagacacaggatgtctctttttttactgtttgcgcccaaaaatcgcttcatgaacggcctgtgccaaatctgtatttccgaacatctctaataccgcaatgacagtctggtccggaatgtgctctgcttcgtgttttggcacgaccagatcgtccatggtttttttcaagctttcattcagcttttgctgcggatacgctttggtgtacatctccaccggatcaagatcatggttcacgcaccattgggcaaacaccaaaatcatcatattttcatcgcgttcgtaagcttcagcgagctgtttttcgttcatttgtcatgctccttatgaaaagtatcttccttaaagatacaggagccgatcaaattcgtctatcccaatggcgatgagcagaaaccgcatcgataaatgccttgctgaaagcggtgtagtcaggttcatctttagccgttacgatgcctggcccctctgttgtcccgacagaggattgaagaaggtcaattccttcatttgccgcaccgatcgccttgtagtgattgtaagcttctctgataaactccatcgcttgtttgttgtcttttaactccggccctcctgcggcatagacggcatcatacagaacagaatcaaccgtcaggaacgtgccgctggcctcaagctgctgtccgctgccgcttgtcatataccccagattttgactgatgatatctactgtgattccttcttgctttaaggcttccagcactgtttgcagctctttttcatgaaatccgtttccggtgagtacagcgacttttcttgttgacgcggttttcactgtacgggcttggcttaacgcaggcgaagtaagaatttctttagatgctttacgcttcgcgggcgccgccacgcctactcctttggcgatttcttctgctaaatctgcatcgacattgctgaagacatcaacaacctgccgctgtacgtctttgcttttgaccttcccgacctcgaagcagaaagcagaaatgatgtgctgtttctccacaggagacatgctgttccagaaaagcttcgcctgtgagtaataatcgttgaagctgtcgcttcgctggcggatttttttgccctcgactttttcctgatagtggacgtagccgccttcttcagctgtcgcaggcgacggatcattgttttgcagtgagtttttatgataagcgacaggccccttattgatcgtcatccgatgataaccgtcatattgattgttatggaatggacataccggccggttaatcggaagctcatggaagttcggaccgccaagacgaatcagctgtgtatccgtataagagaaaagtcgcccctgcaatagagggtcatttgtaaaatcgatgcccggcacgacatttcccgggtggaatgcgacttgttctgtttccgcaaacacattatccgggttgcggttcagcgtcattttcccaatgatcttcaccggcacaagctcttccggccacagcttagtcggatcaagaatatcaaaatcaaacttgaattcatcttcctcatcaatcatctgcacgccgagctcgtattcaaccttgccgccgttttcaattgtttcccacaggtcacggcgatggaaatccggatctttcccggcaattttctgcgcttcatcccatacgagagaatgcacgccgagcaccggcttccagtgaaatttcacgaaacgtgcctttccttgttcattgacaaaacggaacgtgtgaacgccgaagccttccatcattctgtagctgcgcgggatgcctctgtctgacatcgtccacatcaccatgtgagccgactcagggttattggcgacaaaatcccaaaacgtatcgtgagcagtcgctgcctgaggcatttcattgtgaggttcaggcttaaacgcatgaaccaaatccggaaatttgattgcgtcttgaatgaaaaacaccggaatgttatttcccacaaggtcatagtttccttcttcagtataaaattttgtcgcaaagcctctggcatcccgcaccgtgtctgcggagcctttagaacccgcaaccgtagagaaacggacaaataccggtgtcttcaccgaagggtcctgaagaaatttggcccgtgtatattccgtcattggttcgtaaacctgaaaaaagccatgcacgccatacccgcgtgcatgcacaacgcgctccggaatcctctcatggtcaaagtgcgtcattttctcccgaaagtgaaaatcctccatcagcgtcgggccgcgaaccccggcttttaacgaatgctcatcctctgatactcgcaagccttgatttgtcgtcattttcttcccgctgttatcggtcctgtactgctcaagctgctcgtcctttgagtgttcatttacacgtttgttttggtcatcactcatgtctgctcccccttttaaaacgaaacattctacagcacatttacccgtggcgttcttcatataaactgctaatccgctcattaggatttttggtctacatataaatatgcggtcatacacatttgaaataagccttcttcacagaaagaaaggatggaagcgcttaccaaaaaagctgttgaataggggaggtcatatcatgcttgccatactcggttttgtgatgatgattgtctttatgtaccttattatgtctaaccggctttccgctcttattgctttgattgtcgttcctattgtgtttgccctgatcagcggatttggcaaagatctcggcgagatgatgattcagggcgttacagacctcgcccctaccggtatcatgctgttattcgccatcctgtatttcggcattatgattgactcaggcctgtttgatcctctcattgccaaaatcttatcgtttgtcaaaggagatccgttaaaaatcgccgtaggcacagcggttctgaccatgaccatttcgctggacggagatgggacaacaacctatatgattaccattgcagcgatgctgcctctctacaaacggctcggcatgaaccgtttggtgttagcgggaatagcgatgctcggttcgggggttatgaatattatcccgtggggcgggccgactgcgagggttttggcttccttaaaattggacacgtcagaggttttcacgccgctgattcccgctatgatcgccggcattctctgggtgatcgccgttgcttatatcctcggaaagaaagagcggaagcggctcggcgtcatttcgattgatcacgcaccgtcttccgatccggaggccgcaccgctcaagcgtcccgctcttcaatggtttaacctgctgctgactgtcgctctgatggccgcactgatcaccagcctgctgccgctccctgttctttttatgactgcgttcgccgttgccttgatggttaactatccaaatgtcaaagagcagcagaaacgaatctcggcgcatgcgggtaatgcgttaaacgttgtctcaatggtgtttgctgcgggcatattcacaggcattctctccggcacaaaaatggtcgatgccatggcgcattctctcgtttcactcatccctgatgccatgggcccgcacctgccgttgatcactgcgatcgtcagcatgcccttcacctttttcatgtcgaatgacgccttttacttcggtgtccttcccatcatcgccgaagccgcttccgcttacggaatagacgccgctgaaatcggaagggcctccttgctggggcagcctgtgcatctgctcagcccgcttgtgccttccacctatctattggtaggaatggcaggcgtcagctttggcgaccatcaaaaattcactattaaatgggccgtaggaacaacgattgtgatgacgattgccgcacttttgattgggattatttctttctaaatgtatgagcttgatcgtagcattgagtgagtacgtgatttacagaggggagaagatcaaataggatattatgagtgaatagaagattcatgccaacaacttctcattacaatcataagagcctgctatattgcagcaggctctttcacatttggcattatttttttgtatagcgcacccagtcataatgagcgtatagcggatttacaccattgtaggaaccaagccattcatcgacacccgtgccattccacaagttcatcatgatctttccaggtgttgtcggaatttggtttgttgcagtatgttttaattgcccgtcgacataccatttaatagagtttggctgccaatcgaatgcataagtatgataggcattggctgcatcaaacccgagatcaacaatcttctcatggtttcctgcaccatttgtataatagttaaattgaaccttcgttgtgtcttttcctaaaaattcgatatcaatctcatcccaaggagttccatctgttggacctgtgtaagtgaagaacgatgaaacgatccctgtgtttttagctggtttcattctgacttcataaagtccatagccatatgtttgaacagaacggttttccccgcagtcaaacttgttataagctgggcttgttagcgctaaacgcatttcacccaatgacgtcattgatacgttattagcccgccacgtgcagttgaacatatttccattcgaataaccatctgctttttgccaaaaaccggagttatagccgttaaaagggtcaaaaaacgatccacctgtttgagctgaggcagtagaagtgactgcaaacaaactcataaacaatccagtgacaagaagcagcaacactcgtttcagataaggcatattggcattcccctttcattgaaagcgttttctatgttgatcttacatgattcttttaaaagggaacatcggtcaaaataatgataatatcgaatcttactgacttgaatcctgtaactatcatcatcttccctctgaaaaaaataaaaacctaaattaccatcagcacagacagagatgatccgcactcattgtaatttaggttttgcctgctttatcagtaacaatcctaccattttcatatgtgaatgtaagaaaaaatgaatacaaggaaacaaaaatgtcagcgctctcattatgcttgtttaactaccctttctatgtgaatggttaaatacagcagctcgtcacttgtgagcttgtgctcatactcccgctcaatgtaggtttggattttcttcgtgcattcatacgcgcgatgatacttttctttcactgtatccagcaaaaaatcgtcctggctttccatgtgagtgccgttaaaaagacgctgcgcgaaaaactttaagtgggtgacgaaccgataatagtgaagcgattcttcgttgaattcaatcttaaaatggtattttacaatactcaaaatctcttgcatgacttttgtaatgttgataatattgggcatctcttcattcagctcggcatttacaatatgcagagcaataaagcccgcttcatcctctggaagagacacacctgtcttgtttttcaccatgaccaacgcttctttgccgatcgtaaattcgtctttatacagccgttttgtttcccacagcaaggcgtttttgatatcaagccctttctggttgcgctggatggcaaagttaatatggtcggtcagcgacacatagatgctgtcgttgagctttttgccgagctgtaattttgcgtagctgataatctcttcggatacttccatacactcgatcggtatatcatacaaaagggttttgaacttttctgatacatccttgttatcgagcgtgaacactttctcaatgcgggcttcatcgacatcatcgccggactttttctgaaacgcgagccccctgcccatgacgaccaattctttcccttgttcattgaccacgctgatcacattattgttgatcaccttcgcaattttcatgacatgtccctccaatcaactaagaacagactatatcttgattgtacattctttttgtactaggtcaatatcatcagggaaagacggaagctggtcagtacaattcactccgtacctgctgcccgggctgtttttgaagcagcgcctccagatggcgttcaaatgatgccttgtcagctttctgctttttgacaatgctgttcatgattttgacgctttcggcgctgtattgtgtatattgttttttcagctgatccagctgctgtcttgtcttcttcgcgtttttcggtgtgacttggccgatgagtttgatcatactgtctgcggtctcaaaaaaaacggctctattttctgtcagctgctgaatttcgatccggctcatgtcttgattacgcgttttttgtagcaaggcgaccgcctcgctgttttgttttttgagcgatttgttctcaagcttaatcgattcgagattctccttcgcaatgtctgcttcttcttcagtcatgttgcttcgcacgaagtattctggattaccgattccataatcaaatgcttcgctcacttgtatcatggaactgaacacaatggccagctgcctgtcgcttgcgagggcttggaaatcctgctttttcttactgctcatcggtttggctgcggtttgttttactgtcttttgatcacagtctgcgaacatctgagcctcaccttcactttcgcatgcgctcatcacaagaactgtgaccagcaggcttatacacaagcctattcgcctcatgctctgtctcctctctgctgaatcccttctggaaaataccataaaatatagttaaatggtaccagattcacctaaccccagcaataaatcaaaagtatgatttgaagcgcaaaaacataaatattttgtaaaaattgacgtgcattccattcttttcaggcccatttttcgtacaatagaagtatcgttaccggagagggggctctgatgatgaaacgttttacgaaacaagaaaacagctgggtattatatgactgggcaaattctgcttactcaattgtcgtgaccaccgcggtatttccgttattttataaatcagcagctgcggaaagcggtgtcagcgccgctcaatcgactgcctatctgggctataccattgcgatttcaacgtttattcttgcgatgctcggccctattttaggcacaatcgccgactatgaagggtgcaagaaaaagttcttcggtttctttgtgtcagtcggtgtcgccagcaccgcgatgctcgcctttatccctagtgaacattggctgctattgttgctgttttatacgatatcggctatcggtttttccggcgccaatgtgttttatgatgcctttctcgttgacgtcacgcctgagaagcggatgaatctcgtctcagcacggggttttggcttaggatacattggaagcacgattccatttatcatcagtattgctgtcatcctgctcgcacaagcagagacgattccagtgtctgtatcggccgcaagccagctgtccttcttcataacggctgcctggtgggggctgttcaccatcccaatgattaaacatgtccatcaacgctattacatcaaaaaagaacctcatattgtcatcaacagctttaagcggctcggccaaacgatgaaacggatcaggcaataccgggcacttttcctcttcttgctcgcttatttcttttatatcgacggagtcggcacgattattacgatgtcgacatcctatggatcagatttagggatcggctcctcaagccttctgatcatcctatttgtcacccaggtagtcgccgcgccgttttcgattgtatacggaaaactggcagaacgcttcacggggaagaccatgctgtacgtcgggatcgtcatttatatgatcgtctgcgtgtatgcctattttatggagacaacgcttgatttctggatactggctatgcttgtcgccacctcgcaaggcggtattcaagccctaagccgttcctatttcgccaagcttgtgccaaagcgccacgccaatgaattcttcggtttttacaacatttttggaaaattcgcctcaattatggggccgctgctcattgccgtgaccgcccagctgaccgggaaatcctcaactgcggtgttcagtctgatcattttgtttgtaattggtattgtgattctggcctttgttccggaggagaccagcgccgatgtcagccagcagcaaaatgacctgcccctttaactgggagcaggtcattcatcatttattcgctttattcaccttcagctttttccctttgacggttgtgttcttcatcactttgagaacatgagggcctttaccatttaagatctcaacgtatgaggcgttatccatgatcgtgatgatgccgatgtcgtcagctgacacaccgtcaattttggcaatcgttcctacaaaatcaacggctctgattttctttttctttccgccgttaaaatacagcttcataatgtctttattcagctcttcgcttttgtcctttttgctttccggacggtcattcagtttagctagaaattctggtttcttccttgccacttcctcttgagaaggtgcttctattttttgaatttcaaatccgatatattcttcaatgtcggctaaaaaccgtttttcgaaggccgtgacaaacgaaatggcctttcctttgttccctgcgcgtcccgttcggcccgtgcggtggacatagctttccttttcaaccggcagatcatagttgataacaagggagatattttcaatatcaatcccgcgcgcggcgacatccgtcgccactaagtaacggtactcgccacgtttaaattcattcatgacgtcgaatcggtcttcctgaatcattccgccgtgaattttatcgcatggatatcctaagtcatccaattcatcggtcagctgattgacgtgctccttcgttcggcagaaaatgatgcagctgtcgggattctccgtcatcagcacatctttcagcaatgaaaatttatgctcttctcttacttgaatcaccgcatgttcaatatttcttgtggtaagcccggccgctttgatttcgatatgctcggggttttgcatatattgacggctcagcttctcgatatcctgcggaagcgtcgccgaaaacagcatcgtcgtacgctcagtcggcagatgcttgataatcgcctccacctgctcaatgaagcccatattcagcatctcatccgcttcatcaatgaccaaataagagagacgatccaacggcagcgtgcctttttcgatatgatccagaacacgtcccggcgtgccgacaacaatgtggcttttttgcttaagctcagctttttgtttatcaaaggaggattttccaaatacggctgtcgctttgatccgtttaaatcgtccgatgttcgtgatatcttcctttacttgcaccgcaagctcacgggtcggtgttaaaataagcgcctgcggcttgttttcatcccaattcgccagctcacagagaggaatcccgaacgaagccgttttcccgcttcctgtctgtgatttgacgacaagatcctttcgttcaagggcagcggggatcacactctgctgcaccttggtcggttctgtatatcccagtccttccaatgctcgtaaaatgtcatgactgatttgatagtttttaaaatgactcatgtataaactcctgtctcttgcagatgttctcattatactctaattgaccaaggcatatgtgttttgtcgaaaaatgatgtattaaaagccagcgattccctggcgttttagctcctgaacagccaatcgcgccagtgcgtcggcccccgcgcgattcgggtgcagcgtatctccatccatataaagcccgagtgttctttccggaccgatcgatgtaaagtatgccgagctgaggacatttaagtcaatgagatatgttttttcctcttcggccaaagctaaaatagaggccctgtaccatctgtttacagacgaatggatgccttcagaagtaaaatcggttgcccggccctgaggcgttgataggatgacgtccgctcctttcgcttttacctgacgaatcatatcacgcatcatctctttaaactccgcttcagattcattatgcttcggatttgtgtcattaatgccaagctgcaatataaaataatctcccggtttaatatacttcaggatcgcctcaagctgtccatcatttctgaaccctctcgcgatctgcccgccggacgccatgtttctcacttgaaaggtgtgtttatcgatatagtgaggcagcatctgcccccagcccgcctgcttgctgctgttgagcggataataattgcacaccgtcgagtcgccgccgacataaatggttcggttcgtcaccggctgatcagacaatttctttattttcaaggcgctaagcgtaaaagcggtgccggctttcccctctgtcaccagtagattcagctgcccgtcggtgacaggaatttggaacgtatcctccgcgccatcccctgtcatattgatgacctgaaacacgccctccgccgccacactggcccttgccgtattgccaagcgtcgccttcacctcataaaggccgttcgggagatccacttgaaacgtgttattacttttcgtcccatacgctaaaaactgaaccgcatcactcttcactccagtcccagatgctgccacatccttcatattctctggtgtttgaaagccgtagccctttgaccggtcataccgattagacgccctgacaccaatataaccaggctcaaccgaaccgtttccaaagtcaaactgatacaccttctgctccgctgccttcacactctcattcccgtcaaaacccaacatcaacatcatcacaaaaaccgttgccatccattttttcatcaagactccccctctatgaaaacgcatacattaatgcatactcggtgattgtttctttatgatgactgaatgaagaaaaaaatggcgttgaggaataaaaatgaggggagagtctcaagaaggggaaaatcagtgtgacttcttgtcacacttgatcacatcccaacctccgcaatagaaactcatctgatcttcttgatcatacacataataacggagtctttcccattgatcgtcagtcggttcaatctccaactcaaccgcatcaatggattcaaggtcatccagccttgatgcactaatgtcttcaaaccgcaaatgaatgtcacaggtttgagctgatcgttttcattcaaacacaggaatatgaatataacgatcatcttctttcatatagaaagaaaactcgtttaatgtaaatggacctgtatcctcatcagaaagatgctttttcaatttctcgtattgtgtgatattcaaatgaattcctcctatttttagttacctccaaccatatagatctccgcagcatcgtattcaaaccatatgatccgttcgcctgagtccgttaggcattggagcttcccttctgaaaaatagcttttatccggttggggatcagtgatcagaaaaacatcatcattgatggaagctaacagaaagagaaaatctgcaatatcccggtctgcttcctgtaatatggattggaaatggaattcccttttgtccagcttcgtcaccttgtaagcatgaccttcaaaatactcggacaggtcttctataaatgaaccagtcgttattacctgtatcatgattcgatcgtaggcaagccctgcccaaaaacgataaaacgactctgcatctttaagttcgcatgacataacggtttggtcaggcttaagctcgatcatgtccaaattgccaatactgcttatagaggttatttccataaaatcttccccttatcagttggatagcgcaacgcaaatctcttgtctgacttgttcatacaagagaatatgatgatacagatccttatcgttttcgatcatatccggaagtatgtcaggatacagctcaaaaaagcttttctccaacgaacgccgctgttgccggggcatccttttattcgccagcacataatccaaactgccatcaacaagcataaaaaactcatagatttccgcttcaaagccgtacaattcactaggatacggcgtttcttcaagctctcgctgtctttttttcagtttttcaaacacgccgactctctcctccgacacatgttaaataacaaactaatctatcttgaaacaggataggcggatatttatctatcgcctccaacaggtcttcaccaaacacagtgattgtcaatttccacgggtctcccaaaagtccccaagagaagtcctgatgaaaaaagaaataatagtctccatttggaaatacgggaacaggccattcgccaaattcatcctgaggcattgcctgatgagggctaaacatatatccgtcatgctgccaatctagtgcgtacattacttcgttctttccagtacctaattgaaatgcttttaaaatagaagcctctaaatcactcagcactccactcacatcattatgaccagctttactgctcatcgcgcttgagatatcaaacactcgatatggctcaggcggaatgatgtgatgccatctgcttccgggtttccattttatgagcttgttcacttctgaccagatgcggtcttgttttgtctgacttaaagcgcgccaattcatcatgatctcatccctacacctattggatatcctgtttgtaaacaccagaagaggccactgcataaacagcgttacttgtcagtttcagctgttgaacgtctagggcttcaccgttcgagtcacagcatgttatctcttccatctcttgactcacatcggcagaaatcaaataaagagacgactcaagctcttcactgtaacaattgaacgtcccaaccaaaaaaccttcttcagatatcgcaagctgataaaatgcttctgagttcggctctttatccgacagaatccatacccgtctcacgaccgtgtcgtcaaacgcggcaatgactgcatctccgtaatacagcatataaatcaagccgtttttttctgcaagtccataacaatcatctacagccggcgcatccatttcttcgagctttctatcaaagtgtatttccttctgctgaccatccaaagtaaaacaccaaacactatgcccatcaggattttcatcatcataaatgccttcatcatttaaaccgacccaaaggttttgtttctcatccaaaagacagcaggaaacccctgaaggcaagtgaaaagcacttttcactcttccctcttctgaaaaaacctttaccttcggctcatacgattcgtaataaacgaagacatagccatctgcacattgttgaaagagcagaatatcactgtatgaaatctgctctttggctttaaaaacccgaatatcaccggaaggatcatagattgaaatggtcacatcatctttcacaccttttccaatgtagacacgccccagtggatcagcatggaaaaaacaatcttgggtgtccgtgttgatgactttattcatttttaattttttcatttgttatgctcctaggttagaaatgaagtgataattaagcatttattagctattagtaacggacagcctagtttcattaatcgttttgatataaagctactttccaattcagtcttaaagcatttagtatttaattggtatgcataaaacgattgatcatcaaagcgaactgtttcagcttcaatagcaatcagcattctgttcatgtcaataagaaagttagcatttgattgatactccggaattatataatttgatagattctcgattccttctggatgataactcatctcaaatacttgccaactgtattcttccggatctattttttccaatctcatgtcgccaacatctgcactataataagcggatgccacattttgaaatgatattttatgcgtatattcaccttcatcttcaaaaaccttaatatcaagtgagagttcttttttaaacacattaaaatctaaatgaagaacactgcacccctcatctatataatcaacccattcattaatcgtttgatacattgtcatcccctgcttctttttaatcaatagcgcctttccaccaagcagaaagcaaattactccgtatattgtttgatccaatcatttaaatcatctgttgaatgcaaataagtttcaggagaatctttcaaatcaattccgcttaaaaggattaacatatcccagactctaccgttttttactttagggtcatccgcataaatataagggcccgcccaatctgacacttcttctcttgttgtttgtccatttaagacacttttgattttatttatgcattctagtagttttggctcgatcaaattgatcaccacgcactcaatattcgtttggtataccgacaattctatttattttattaaagcctgctgagcaatcagatgatcaacagacaattcggtaaaagatcctctaccgaatgaattctattattcgctttgaagatccaaacaaagtatttaataaatgttattctcattaacaataattgcatttttatattcttctgctgatgttttcataaaagaaatttttttatgattaaataaagtattagtttttaaatttgcagagtatatataatcattactatcgctttttaataccaactaagttttcaatatattatatgctctattgttttatttttttcaagccaatcatagtcattaagagttgatatttcatcaaaatagtacattcacttttccttttactaattgagaaagctttttttcgcaccaagaatttgaaataactgtattattgatttaacatgttagcttcattggaataggattacaatatttttctggaacgtttatgttattttaagaatcaaaaaaaggccgcataggcctttttacattttccattattgcatttgttcaatatccgtaccctcagctgtcacattcgccttcccctgcctcctgacaagcgtcaaggccatgcccgcaaagatcattacgatgccaagcgtttgatagaggtcagggcggaaacctgtgaagacggtatcgagcacgattgcgacagcggggtcgagaaatacaatgattgaaataaatttcgttgataaaaatcgtaaactgtcaaaaaacaacaaatatacaatacccgtatggatgatgccggtagataccaccataatccagtttccctgagataggtcagcaaaagcgccaaagtgaataaacggaatcaggatgataacccctaaacccgtctgcaagaaggtggtcgtgtaaggactgagattgtgaatgccttttcccaataaagtggtgaacgcataaaacagtgcggcgagaactgcccatatgatccctgatcccatcagctgtgtcaatgaagtgctgccgttaatcccggaaatcagcgcagttcccagaaagcagatgataatggagctgacggagatcacatttaatttctctctgtagaggaagctacccagaagaagaacaagcaccggcgctagatgataaacggagatggcaattgtaacggacgtttcttcaaaagacttaaataagaacacccagttgaatacaagaaagaaaccgcacaccaatgtttgcagcacgtctctcttgctccatttttcagttttatactggccggacgccagccagcaaaggcctaaaaacagcgtcgcgcaaaggcagcggacaaagaccaattcaaatgacggcagattagtatgctctgagaaaaagccgatggagccgaaaatcaccatagagatgaccattttgattacggctgttgttgatttttgttttggtgtgattgagagatcttgctgcatcaagcgtattctacctccaattatgtatagggaaaagcaccccaactgcaaggtgcttttccttttttatagtttcttgccggccgtccagccgccgtctatgacaaagtttgaacctgtaataaagtgcgcctcatcagaagccaaatacttcatacaggaaacgatatcactcggctgcccccacgtatgaagggcatggttatctttgatcagctgaaccatttcatcgtcttgaaaatactcttccgttaattctgtttggatcacgcccggcgaaatgctattcaccctgatcccctttgatccgaactccatagcgagctgcttcgtcagtccgatgatcgcatgcttggaagacacataggcagcccgcgcaggctctgccatcagcccggacacagaggcgatgttgattatacaccctcgtttccccagctttgaccacagccttgccgcgtcccgagaaagaataaaggctgccgtgagattaatgtctatgacctttttgaatgattctgctgataattcaagaacaggggtaatttcccttatccctgctgcattgatcaaaatatccgggatcagccggcttttttcaagttttagcatcaaagattccgcctgccggacatcagacaagtctgctttttccatgtgaaactcactgtttactataaattctgacattttattcgtttgaatatccactccaacgactcgaaagccttctgttagaaattgctttaccgccgcaaagccgattccgctatttgccccagttatcattatattctttttcttcatcattttacattctgccttttttcactttggtaatttgtaataatctgaatattattatttgacaatatattacaaataatttagcattgcactacatcctctattttccacattttctatcatacaggaaattactaaaaaaaacatctactttttaaggagagattcatatggttcaagtttcaaacgtacaaaaagagttgacatccgatatttctaaatatgcttcttttttaaaggaaaacggctattcgtatatcccagcagatttctatcagcagaaaacaacagacgctgcagtccgcgaattacagcttacatatgatgatttgaaagctgattctaaaggaggcggccgttacagagcgcattcccgctacattttggctcctcactccgacactcttgaattagatccggataatggatatttccaatcaaaagaatataattatgatgatggcggtatcgtcagacaattcgaaaaaatatcagatgagtttctacagcatcctgtaacgcggcacatgatacattcaaatgtagaaatggctcgccaaaccgattttgtagattgggagaaagaagtgatcgtcgggcttcaccaagtcagatatcaagtgacacctgacgcgccttcatacagctcacccatttggctgcatcgtgacgatgaaccgcttgttttcgtccatctatttcagctgagcgaagatgctatcggaggagataacttaattgctccgtctgttaagcaaattgataaagtgctgcggctgacagacccgcttgagacacttgctctcgggcaaaaggtctttcatgcggttacaccggtcggcactgccaatagagatggtgcgcatcgagatatattattagttacattttctaacagataaaaaaagcgcccttgggcgctttttttacaaatctatcgaacaattaaaaccgggcatgttgataattgagacactttatggctgacgcttccaagcatcatttctttcaggccgctgatcccccggctgccaactacaatcaggctgacgcctttctcttttgcgtgatttagtatctcatgcgccggctcgccattcgcgtaaatggtttcagcttgaacgcctttttcggctgctttttcttttgcattctcaaggattttcaggccctcttttttaacctcgttcctgatttcatcaataaagtgttcaggcacatagacaattcccgtcagagaagaagtcgtgacgacggcttctctccccacatgaagaatgcttagttccgcttgttgctcttttgccaaatgcactgcggcatcaagcgcttttgcactcatgtctgatccgtcaatcgctactaacattttgttaaacatgctcttcccgcctttcggactgtgggtggttcatctttctcttttattgtccgcctgcatttcgttattgtcaattgaagcgcatgagttttcaaaaaattgtcagagactctctccgtttgtggcgatgacctgctgataccagttgaagctttttttcttgatgcggttaaatgttccatttccttcattgtccctgtccacataaatgaaaccgtagcgttttttcatttccgcagtagatgcgctgacaaggtcaattggcccccatgatgtgtatccgattaattcaacgccgtccgcaatggcttcgcgcgcttcaattaaatgatcacgcagatagttgattctgtaatcgtcctgaatcgtgccgtcctcttcaaccttgtctacagcgccaaggccgttttcaacaatgaacagcggcttctgataacggtcgtataaggtgttgagcgtgatgcgcaagcctttcggatcaatttgccagccccattctgatgatttgaggtaagggtttttgactccgcccagcaggttgccccctgattttgcaagctcttccggatctgtgctcgccgccatcgacatgtagtagctgaatccaatataatccaccgtatgttctttcaagagctcttcatcgccttcaaccatttcaatttcaatattgttttctgccagatagcgtttcatatatcccgggtatacgcctcttgcctgaacatctgagaagaaaagtgttttgcgctcattctccattgccgcgaagacatcctccggcttagaagtcatcggataggttgtcgttgccgctatcatacagccgattttcgaatcaggaatgatgtcgtgacccgctttgacagcaagagcactggccacaaattggtggtgtgccgcctggtacatcgcgtttaatttgttttctccttcttcaaaaacaagaccgcctccggtaaatggcgcatggagcactacgttaatttcattaaacgtcatccaatacttcactttgtgttgatagcgtttgaaaaccgttttggcatagcgttcataaaactctatgactttgcgattcttccagccgccataatttttcactaaaccgagcggcatctcataatgagagatggttacgacaggctcaatatgatgctttaacagctcatcaaacagatcatcataaaatctgaggccttcttcattgggctcctcttcatcgccattcggaaaaattctcgtccacgcaatcgatgtgcggaacgccttaaatcccatttctgcaaataaggcgatatcctctttataacgatgataaaagtcaatcccgttgtgatacagattcaaggaagtcattgattcatcaaatggagacatgatcccgttcggcgatacgtcagctgtcgaaagccccttaccaccctcgttataagcaccctccacttggttggcagcaactgcgccgccccataaaaatccttctggaaatcgtttttcatttgaactcatattgatcaccccattagttttttcaagataaagcaagcagcgcttcttttggctgcactttaccgatctctttcaccggcgaaaacgaatattggtctgtgttggtcacaatcaccggggtaatgacgtcatatcccgcggctttgatttgctccagatcaaaggacacgagcggatctcccggtgcgaccttgtcgccttctttgacgtgagccgtgaaccattgtccctccagcttcaccgtgtccaatccaatgtgtatgagtatttcagctccctgatcactcgtaatgccaattgcgtgttttgttttaaaaatggtggtaacgcttccacgaacaggcgacacaacttctccttcttcaggctcaatggcaaatccttttcccatgatcccggcagaaaatactccatctttgacttcacttaaggctttcacttctcccttaatcgggctgtgaatgatctctctgctgccctcatgcactgccggctgctggctgccgtcagaaggcacatcctcgaatccaagcaaatacgcagctgctgttcccgccgcaaacgcaatcacaaggccgatcatcgcgtaaataaacgttgggccgataaagacagggatgctcgggagacctgcattccctccgacgatataggaagcaacacccgtcatgccgtaaaacgcgccaccggctgcaccgccaatcaaagcggccgcaaacggctttttcaatcgcatattcacgccgtacatcgcaggttctgtgatccccatcagcgccgtgatgcttgtggtaagcgcgagtgatttaaattttttgtttctggagcgaaggaagacggcaaatgatgctcccgcctgccccatattcgccaaaaacatagccggcagtaaataatcgtggccgttttgagcgatgttgttgatcatgatcggcacaaaggcatagtgcatgcccgtcataatgattaaagagaatgtacccgccagcaaaatcattgccacaagccctgcatgatcaaacaaataattgaccccagaagacaagtattctcctaaaatagcgccaagcggaccgactgtaatcaatgtcagcggcacgacaatcaatagcgtgaatgtcggaaccacaatcaatttgagagatgcgtgtgtaaaacggtcaatccatttttccacgtatgaagcaatccaaatcgacagcaaaatcgggatgaccgttgacgaataagtggcagcggttacaggaagcccgataaaggaaatcggtttccccgcaccgagcagggctgtcaaatccggatgcaggatcgccgccgcaatggcagccgctacgtacggattgcttccgaattttctcgccgcactcatcgctagcaggagcggcaggaagtagaacgcaccgtcaccgacagccgtcaaaatgacatgaacctggctcttctccgccatccagccaaacgtaactgccagcgcaacaagccctttgatcatccccgctcccgcaatcgcaggcagaatcggggtaaacacaccagaaatcacatcaaagaccgcactcagcacattctttttctgagaggatgaaccagcgctcttttcatcactgagattgctgtgccgcacaatcgcctgatacaccttcggcacatcgtttccgataatgatttgaaactgctcgccgctgatattggtgcccatcactccaggcagctgctccaactgactgcgatccgccttcgaattgtcatgaagattaaaacgcagcctcgtcatgcagtggatcacgcgctgaacgttgtcttcaccgcctacgagttgtaatatgtccttcgataatttatcataatccatgtgtatacctcctttttatggggggactgctggaagaaaggtggccgcctttcaccagctttttttctatcaaatgctgcatcacctcctaaaagagaataaaaaaaacctaaatgacacagattgcgagagtctcctcctgcacctgcaccatttaggttttgcctgctttcacagtaacaatcctgacgggtcgttttatttgtttgtaggtatactttagcactagatttatcggatgtcaacgctttcatttttgagttttgactaaagggaattacttattgaggactgctttgttatagagggaagccattttgtatattttgttttatttttctgaaaatactatcaaatatatcagctgacttaatataaaagtaaaaaaccttgaaaggcaatttagcccatcaaggtatatgttttatttttgactatcccttttccatatactttctccgtcagttaaaaaaactgcacttggcggatcatcataaagtgaaatttcaactaatgaacctttcttttgtattaaccaattatataaactactttcttcactagtaggatgagctaaaatatcatttacttgaaatgtaactgcataatattcgataaaattcacatcatcgtcatccaacccattgtctgtttcaaagagtgtgtctggttcaccaataatctttaatccactatcccactctattatcaagtcactatctttatactcttttaacgcttttattaaaggatcatattccatgtatatcctcctcaagagaaaagtctctgcaatcatgccgtgagagtcagattctacagaggaaatcgcatgctgtgtttgtttcagtacttttttgtattcgtcgataaacatgccaaagaaaaggagaagggtttatgaattagctttataaaagattatttttattaaaaaaccttgaaaggcatatagccagtcaaggtatgataacaataacattatatttagaagtatcaactacttcacctactgatttatctgagagaatatcataattgttttatatattctttctaataaaataaggctattttaaagtaactccactccaacttgtttgcaaaatttaactttaagtctctcttcttgacccacattcattaccataactttgtcatctttttttatacttgttacattattaaaatcacctgtaaatactatagaatcattaaatgtaatacttagactactcgtttgcttatatacatctaaagttaaaatcaccttgaaattttggtcatctttgtaagtataaattaattctccatcatctatattgcctgttatactcaccggctcactttgaaaaagttctaatagatcatattcatcatactttataaacatttgtattcatccttttattaattatttcggtataactgtgataacatcgcctgcttcatttattattactttgacatccagtgtttcatgaacaaacgttccgcttctattaccaggtatctttttcgtattcattatagcgtcttcaataactgaaggtgaaatatttcttgggtcaacatattttttgataaaatcactaaattcttttgtttgtggtttatatcctaattcttcagcttttttaattgctctacttgttaaagtagcttttacttcaggaatatcaggtgccattctttccaaagcatgctgagaatactttcttccatttatttctcctccgccttttgacatgttccaaccaatttcacccttacccttagaagcaactttattaacctcacccttactttccttctccgcaacatgtttagccacatctgtgacaacacgcttcccgcctcggaccgccaattttttaatagcgccctgaggacttacccactcaataaattcatattgagttccggcaagaaacgaatcaattggcttagctccgcctactttatcctctggtatgtaagacacttcttctagccgctttttccctccagcatagaattctcttacgatctggccgttttcataaacataatatttgccgccgacatagtcgatgcttgcagtattgcgagttagttcgtcaatcacttctatcgtatctatcttttttaatcttttattattatatagtttatcatttatcacccgtatgtctccatagactttcgggtgagctgctgcttctttctgtaatacagttacgttactgtcatcagcatgaatctcacgctcgatcttctgttgtttgccatccttcatcacgatatcaacgttggactgcttatgtttctctattttcttcagcatcatctccatcggtgaatcatccggctgcttcatttgcgagttaatgccgccgaaggtttggttgatgttttcttcttcctgtgatttcaggatagagccgcttttgtagcctgtgatttcaattttcggaccggtatacatggttccgagctggtctatatattttttcatcgtttgaaaatctgattttgcggtttctaatgcttgggtttgctggccgtcaaattgaaagagcttattcagggtgtctgaaatcagccgctcagcctgttctgtttccatccgaaaaaaggaatcattgactgtcggcaggctgacgatgtgatcgatggctgatgtttggcgattgactgcgtcagtgagctgctctgtcacttctcgtgcatgcttgaccccatgtctcgcatcgtgtgagagaaaagcctctgcgatcatgccgtgggagtcagattctacagaggaaatcgcatgctgggtttgtttcagcacttttttgtattcgtcgataaacatgccaaagaaaaggagaaaaggcttgtggcactcctcgtaaaaggtccggatggcatctccgccttttcctttcagcgcatccctcatgcctgccagatgctcaacgcttttttccagcttctccagctgttgtttttgcttgtccagtttctcaatcgtatgctgaatgccctcgtgaagagcgtggacatctaatgttttcaatcccttgtcctcccgcgctttatttcatggaagatgatatgttttcgtccgtttccttcatggcgtttaccgcgctttccgtttgtgcgatatgcttggccagaacagacgcatatgcttcagtgagctctttgatgtccttatttaattgctcgatggacttcacaacattcaaatggtttctgcctgagagatggccgggtaaggaggacttgagttcagctgaattcttgagctgagaaagcccttgcttcactgtgccatacaccattttaatttcctgtgccatttgtgctcacctcactttttatgtttttctttctctatttcatgctctatcctcgtaatttggcgtcttatggaatagacatcgccctctaatgagtggatttttccttctatgctttcgatgattccgttgacttgatcgcttttgatttgctgatatgctttgttcattccttcacgaatatcttcaaaccgctgagcatgtgttcctctccatgcctcccggttaagatgaggccggtgaatgagatgctgggcctcggagaattcgtgtttgatttgcctgatttcgtgcagcactcgttttaattgatggatctgttcctgcttttcatgtaagtcggcttttaccgaatgtaacaacatttcactatgcatgccgcaacacctcgtgtttctatcaaactgtgtcaattctttacaatacagactattttcatattacatgatgggtcatattggataaataggtaaaaaggattgtcttgaggaactttataccggttctaaatagctaaaaattcaatttcataactttgtaagagggagaatcatcatattggggacttttcgtttaggtcttgaaccccgcaatcacttctgttttttctctcgctcaaccatttcttatagtcaataaagctcataaaaaagcgccttctctagaaggcgccttctccatcttatttagatccccatacagcctcaccgttgccattcaaaacactaaacgtcatgacgttcttctctctcaccgaatcccactggcgtaaaaataccccgttatacttcttgccagctaacgtgatgtcgactgtgttttttccggttttctgccatgttccggtcatttccccggaaatggtgtggtttttgttgagctggataatgatggtttgtttgatgtcggctgagatgtcttttccgtgctggataagtttgtatgttcctgtgatgtctttttgttttacttctttcaatgtttcgcccgcataacgatatggtgctgctaccggccagccgtctttgttcatgaacaattggtggactctgacttcgtgttcttcacccctgcccgggaagcgggtgtggaagattaaataggaacgcccggttttttcatcatagtatgcggagttgtggcctggtgagacgtacccggtgcctttttcattttctgtttcaaaagtgtagctgcccatgagtttgacgccgtatggttcgatggaacggtcgtcgaagaatgtgccttctttgccgcggacgtcaagcattggattgccttctgcatcatagtaagggccgtctggtttcttggagcggaccacacggatgttatagccgcctgttgcatcaagaccgccatatgataggtataagtagtagtatttggtgtctggattgtagagaacatacgggccttcgattctgctatggttgccgccgagcagttttttcccgtatccctgtccaggaagcgggaagcccgttttcggattcatttcaagtatgaaaatgccgcctgagtatgatccgtacaccatccacagcttgccgtctttatcaaagaaggtatgcgggtcgacgacattcggatgtttggttgcgtcatacggtgttccatcgttgcttgtgccttccattcctgatttcaaaaagatgcctttgtttttgtatgggccttcgatgttgtcagcaacggcaacacccatggcggatcttggcgaatcgccgcggcaggcgttgtagtacatgtagtatttgccgtccgccagctgcgtgacgtcagccgcccaaagagtatcggattgcgcccattcgaaggtttcttttaattctttatagacattcgggataagtgggttgtcattgcttacgctggtggtcagctgctgccattgcatgaggtcattcgatttagctgaagcgagatgagatccaaaaacataaaaagtgccgtttgtttcaatgatggaagggtcatggacgctgacttctttaaatataggtttttgtgcatagacggagtttgggagggtgaaggccatgataagagctgcaagaaaacatacacagaacaatcggttgaacatctaaacaattcgcctctcttttttattaaattttaaacgcttacatttccctatgaagataccccggcctattaaaacagccgaatgttttcatattcaaacagataggtgatttctcactgttctcttacatagtcagactgatgtctgtctgttttgcgcagaactgctgcttgcatacctctattcatagttcaacccttttgccgtttctccttcttcaattacttctgtttcttcatttgcgtacataatgaacgctttgtccggtcttgtaaagtcgtcgacttttctccggcaacttcgcctctttttggcattttacctctcattgtcagcaatatgacagcggccgcttgcacttctgtctgggtatgcgtgtgcaatgtgctgctttctgcgtcacactattacaatagcaatctaacttgttaaagactgtaaaaaaccttttgacttctgctgctgaaccaattaatataatactcagttaatagttatcagaatttttaggaattgagtgattcatatgacactgcataaagagcgtcggatcggccggctgtctgttctcctgctgctgaatgaggcggaaaaaagtacgcaggttgaggagctggagcgagacggatggaaggtctgtcttggcaaggtaggatcaatggacgcgcataaagtagtagctgcaattgaaaccacttccaaaaagagcggtgtcattcaatctgagggttatcgggagtcacatgcgctttatcatgcgacgatggaggctttgcatggcgtgaccagaggtgaaatgctgctgggatcgctgcttcggacggtgggcttgaggtttgccgttttgaggggaaatccttatgaaagtgaagcggaaggcgattggattgctgtctcgctttacggaacaatcggggcgccgattaaaggtcttgagcacgaaacattcggtgttggaattaatcacatatgaaacagcccatagatcttagacaatagggggctatgcgtgaaaacagatgttcacagcatagctcctttttgtatgggcgctttaccaaagtaaagaaaaaggagttgggcttatggtgactttagacggttcttcattgacaacagccgacgtcgctcgtgtgctgtttgattttgaggaggcagcggcttccgaggaaagtatggagcgcgtgaaaaaaagcagagcggcagtggaacggattgtacgcgacgaaaagacaatctacggcatcaacaccggatttggcaaattcagcgatgtcctgattcagaaagaagactcggcggcgctgcagctgaatttaattctttctcatgcctgcggagtcggcgatccttttcccgagtgtgtgtccagggcaatgctgcttttgcgcgccaatgcgctgttaaaaggcttttccggtgtccgcgctgagctgatcgaacagttgcttgcttttttaaataaacgcgtccatcctgtcatccctcagcaaggatcacttggcgctagcggagatttggcgccgctttcccacctggcgcttgcgctgatcggacaaggagaagtcttttttgagggggaaagaatgccggcaatgacaggcttgaaaaaagcaggtattcaaccggtaacgctgacatccaaggaagggcttgccttgattaacgggactcaggccatgactgcaatgggggtggtcgcctacattgaagctgagaaactagcctatcaaacagaacgcattgccagcttaacgattgaaggtttgcggggaattatcgatgcatttgacgaggatattcactcagcacgcggctatcaggagcagatcgatgtcgcagaacgaattcgcttttatctatctaacagcggcctgacaacctcccagggagaactgagggttcaggatgcctattcattgcgctgtattccgcaagtacacggtgcgacttggcagacactaggctatgtcaaagaaaaattagagattgaaatgaacgcagctacagacaatcccctcattttcaatgacggtgacaaagtgatttccggcggaaactttcacggacagccgatcgcctttgccatggattttctgaaaatcgcaatatcagagcttgcgaatatcgcagagcgccggatcgaacgacttgtgaatccgcagctgaatgacctgccgccgttcctgagccctcatcccggtctgcaatccggtgcaatgatcatgcagtatgccgcggcctcactcgtttctgaaaataaaacactggcccatccggcaagtgtggattccattccgtcatccgccaaccaagaggaccatgtcagcatgggaaccatcgccgctcggcatgcttatcatgtgatcgcaaatacaaggagagtcattgcgatcgaagcgatttgcgcattgcaggctgttgaatacagaggcatagaacatgcagcgtcctatacgaaacagctttttcaagaaatgagaaaagtcgtgccgtccattcagcaggatcgtgttttttcctatgacattgaacgcttgactgactggctgaagaaagaatctttaatacctgaccatcagaataaagaactaagggggatgaacatatgactgatgtaaaaaaatcaatccgtgccaacagaggaacagagcttgaatgcttaggatgggagcaagaggcagtgcttcggatgcttcgaaacaaccttgatccagaagtcgccgagaagccggaggacctcatcgtatatggcgggattggcaaagccgcacgggattgggacgcttttcacgccattgagcattccttgaaaacattaaaaaatgatgaaacattgctcgtgcaatccggaaagcccgttggcatgttccgtacacacccgcaggccccgcgcgtgctcctagcaaattctgttcttgttccgaagtgggcagactgggagcatttccacgaacttgagaaaaaagggttaatgatgtacggacagatgacggctggaagctggatttacattggctcacaaggcatattgcaaggaacctatgaaaccttcgctgagttggcgcgacagcacttcggaggcagcttaaaaggaacgttgacgctgacagcgggtctcggcggaatgggaggcgcacagccgctgtctgtcacgatgaatgaaggcgtcgtcattgctgtcgaggttgacgagaaacgcatcgacaagcggatcgaaacaaaatactgcgatcgaaaaacagcatcgattgaggaagccttagcttgggctgaagaggcaaagctggcaggaaaacctttgtccattgcacttctcggaaacgcagctgagatgcatcacacaattttgaaccgaggcgtcaaaattgatattgtgacagatcagacatctgcccatgaccctttaatcggttatgttcccgagggctattcccttgatgaagctgaccgtttgcgtcaagacaatccagagctttacgtgcgccttgcgaagcaaagcatgaaaaaacatgtcgaagccatgctggcctttcagcaaaagggctctattgtatttgactacggcaacaatatccggcaagtcgcaaaggatgaagggctggagaatgccttcgattttccggggtttgtccctgcctacatccgccctttattctgtgaaggaaaagggccgttccgttgggcggcgctttccggagatccggcagatatttaccgtacggatgcgttattaaaagagctgttcccgacaaataaagcccttcaccgctggattgatatggcacaggaaaaagtcaccttccaaggcttgccgtcccgtatttgctggcttggatatggagaacgaaaaaagatgggcctcgccattaacgagctggttagaagcggggagctaaaagcgcctgtcgttattgggagagatcatttggactgcgggtctgtcgcctctccaaaccgggagacagaagcgatgaaggacggaagtgacgctgttggtgactgggctgtgctaaatgcgcttgtcaacacggcggcgggtgcaagctgggtttctttccaccatggcggcggcgtcggaatgggctattccctgcatgccggcatggttgcagtggccgatggaagtgagctggctgacgagcggctcgcgcgggtcttaacgagcgacccaggaatgggcattatccgtcatgcggatgcgggttatgaacgtgccgttgaagtagcgaaggaacaggacattatcgtgccgatgcaaaaataaaggagtgatgacatgccaaagcaaattgatacgattctcatcaacatcggtcagcttttgacgatggaaagcagcggtccgcgggcaggcaaaagcatgcaggatcttcatgtgatcgaagacgctgttgtcggcatccatgaacagaaaattgtgttcgccggacaaaaaggggctgaagccggttacgaggcagacgaaatcattgactgttcgggacgccttgtaacgcccggcctcgttgatccgcacacccatcttgtatttggcggatctcgtgaaaaggagatgaaccttaagcttcagggcatttcatatttggatattctggcgcagggcggcgggattctgtctacagtcaaggataccagggcggcttcagaagaagagctgctgcaaaaagcccattttcatctgcaaagaatgctgtcctacggctcaaccacagcagaagtgaaaagcggctacggcttggaaaaagagacagagctcaaacagttgcgtgtcgcaaagaaactgcatgaaagccagcctgttgaccttgtttccacatttatgggagcccatgcgattcctcccgaatatcaaaacgatccagatgaatttctggatcaaatgctttcccttttgccggaaatcaaagagcaggagctcaccagctttgctgatatttttacagaaacaggcgtttttacagtcagccaatcccgccgttatttacaaaaagcagctgaggcaggcttcggattaaaaatacacgcagatgaaatcgatccgcttggaggcgctgaattagcaggtgagctaaaggccgtctcagccgaccatttggtaggtgcatcggacgaaggcataaagaaattggctgaggcaggaacgatcgccgtcctcttgccgggcacgacattttatcttggcaaaagcacatacgctagggctagagctatgattgatgaaggtgtatgtgtcagcttggcaacggattttaatcctggcagctcgccgactgaaaatatccagctgattatgtccattgccgcgcttcatctgaaaatgactgcagaagaaatttggcatgcggtcacagtcaatgccgcatacgccatagggaaaggagaggaagccggtcagctcaaagtcggccgctcagctgatctagtcatttggcaagcctcgaactatatgtatattccgtatcactacggggtcaatcatgtacatcaagtcatgaaaaacggaacaattgttgtcaacagggagggagccattcttggataagtacccttttctcagagaggccggatcttcgtttaaagaccgggatgtcacaaaaatgagcgacctgatcgcaacatgggacggccaggacattaagggaccggcgttgataggtgtccccctatcaaaatcctccatcagtcattcaggcgcttcctttgcacccggaacaatacgccaggctctgaaacattcatcagcctattctgctgagcttggagagcatgtcgtatcagagcttctatatgatctgggggatatcgatattcatgtcactgatatcgtaaagtcacatcatcacattttccaaaccatgcacgctctgctttcggaccatcccgattgggtgccgctcatacttgggggagataactctatcagctactccacaataaaagcgatagcacaaacaaaaggaacgacagcagtgattcaatttgatgcccatcacgatgttcgcaatacggaggacggggggccgacaaacggcacccccttccgccgccttttggatgaagagattattaaaggccaacatttgatccagctcggtatcagagaattcagcaacagccaggcctatgaagcatatgcaaaaaaacatagcgtgaacattcacacgatggacatgatccgggaaaaaggactgatcccaacgataaaagagattttgcctgccgttcaagatagaacagatttcatttttatatctgttgacatggatgtcttagaccagtcccatgcacccggctgtccagcgattggcccgggcggcctctatacagaagaattgcttgaagcagtcaagtatatcgcacaacagcccaatgttgccgggattgaaattgttgaagtcgatcctaccctcgattttcgagatatgacaagcagagctgcagctcatgttctgttacacgcattaaaaggaatgaaactctccccattcaagtgatcttctggcaggttgtattttgggtataagaaactcatctgcctaatgaatggcagctaaaaggagggcgagacagtgaatcttcaggagaacagcagccaacagctaaaacgcacaatgaaaagcaggcacctatttatgatctcattgggaggcgtcataggcacaggacttttcctcagtacgggctatacgctacatcaagccggacccggcggtacgatactcgcttatgtaatcggcgggttgatgatgtacctcgtcatgcaatgtctcggcgaattgtcggttgccatgccggtgaccggctcttttcaaaaatatgctacaacatttattggtccatctaccggttttatggtcggcatcatgtactggatcaattgggtggtgacggtaggctctgagtttaccgcatccggtattctcatgcagcgctggttccctgacagcagtgtatggatgtggagtgcgatttttgcagcccttctttttatatgcaacgcattttcagttaagttatttgcggaaactgaattttggttttccagcgtaaagattgtcaccattattttatttatcattctaggaggagccgccatgtttggcctgatctctttaaacggaacggcggatgctcctatgttgtcaaacttcacggaccatggcgggctgtttccgaatggctttcttgccgtttttatcgcgatgatatctgtgagttttgccttttctggtacagagttaatcggcgttacagcaggagaatcagcaaatcctcaaaaggatattccgcgatccatccgtaatgtcgcatggagaaccgtgatttttttcattggcgctgtcttcatattatccggattgatttcgtggaaggacgcaggcgtgattgaaagcccttttgtagccgtatttgcggagatcggaatcccttacgctgctgatattatgaatttcgtgatattaacagccttgctgtctgtcgccaactcaggcttatatgcttcgacccgtatgatgtggtcgttagcaaatgaaaacatgatcagctcccgttttaagaaagtgacctctaaaggcattcctttaaatgccttaatgatcagtatggctgtatcttgtttatctctcgtttccagtatcgtggcccctggaactgtctatgtggtgatggtcgcaattgctggatttgcaggagtcgtggtctggatgagcattgccttgtcccaactcttgtttcgaaagagatttctgaaaaaaggggggaatgtaaaagatctgacatttcgcacgccgctttaccctcttatgcctatagccgctcttttattatgctcagcttcttgtattggtcttgcttttgatcccaatcaaagaatcgcacttttctgtggagttccttgtatcatcctttgctatctgatctaccatttcaaaagaaatgtttcaaaagcgaaaaaaatcagccaagaggaatatccggccgatcacatcctgtaattaaaaaagcacaccccgctcaggatgggatgtgctttattttttattcagtaatcaacgtatgaatcagcttcggcgccttcgcttccgcggcgaggcggatgttgtcatagacttttgcgatgacttcatcgacgttttcgcggttggcgtaaagcgtcacgagcggttcgcctttttctactttgtcgccgacctttttgtggagcatgatgccgacggctaaatcgatctcatcttcttttgtggcgcgaccggcacctaacagcatcgccgcgacgccgatttcgtccgcaacgatttcagagacgacacccgcttctttggcaggcacatcaatttgatatgcggcttgcggaagcttagacggatcgtcaacaattgagctgtcgccgccttggtttttcaggaaatccttgaatttctcaagtgctttgccgtttttcatgacttcttccagcttcgctctcgcttcgtccaatgtatcggcttttttcgcaagcacaaccatctggctgccgagcgttaagacaagctcatgaagatcctcgggtccctcgcctttgagcgtgtcgatcgcttctttgacttcaagcgcatttccgatcgcaaagccgagcggctgggacatgtctgaaatgacagccattgtttgacggccgacgttatttccgatgcgtaccatcgctttggcaagttcagctgcgtcttcttctgttttcatgaaggcgcccgctcccgtttttacgtcaagcacgatggcgtccgccccggcagcgatttttttgctcataatcgagcttgcaatgagcggaatggaattgaccgttcccgttacatcacgaagcgcgtacagttttttatcagccggcgttaaattgccgctttggccgatgaccgcaaccttgtcgcggttcacaagtttaataaattcatccttcgtcagttccacgtggaagccgtcgattgcctctaacttatcaatcgtgccgcccgtatggccgaggccgcggccggacattttggcaaccggtacgtcaagagccgcaacaagcggagcgagaacgagtgttgtcgtgtcgccgacgccgccggtggagtgtttatccactttaattccttcaatggcagaaagatcaatcgtttcaccggagttcaccatagccatcgtcaagtccgcgcgttcacggtcactcatatcctggaagaaaatcgccatagcaagcgcgcttgcctgataatcaggaatgcttccgtctgtatagccgttcacgaaaaattgaatttcttcagtggtgagttcttttccgttttgttttttgatgatgatatctaccattctcatgtttggtcaccgatccttttcgattaagttcagtaaatcaagcccacaattgctgctgataaaaagctgacaagcgtagcaccgtataataatttcaagccgaaacgagcgacgacatttccttgcttttcattcagtccttttacggcaccggcaatgattccgattgaggagaagttcgcaaatgacacaaggaataccgatacgatcgctgttgtacggccgctgaaatggaaaccgttttgcgtaagcgacgtcatggcgacaaattcattcgataccatttttgttgccataatgcttccagcattaacagcttcattccatgggataccgacaagaaaagcgaatggagcaaacacatatccaagaatgccttggaacgaaataccgaatactgcattaaaaatgccattgatcaaggcaataatcgcgacaaatccaatcagcatcgcagcgacgacaaccgctactttgaaaccgtcaaggatgtattctccgagcacttcgaagaaggattgtttttcttcttcctcaacacgaagcatatcctcttcttttgcaacctcgtacggattaataatagaagcaattatgaaaccgccaaataagttcaagaccagcgctgttacaacatattccggtttcagcatggtcatatacgcgccgacaatcgacattgacacagttgacatcgcagatgcgcaaagcgtgtacaagcgctgctgatttaaaagaccgagttctttcttcaaggagataaatacttctgactgccctaaaatcgcagaagccactgcgttatacgattccaatcttcccataccgtttaccttgctgagggcaaggccgatatatctaatgataaacgggaggactttccacttttgcagaatcccgatcagagcggaaataaacacgattggcaagagaacattcataaagaatgtcgtttggtccgcattcaccaagccgccaaacacaaagttaattccctcagccgcgtattcaagcagataaccgaatccttttgcaaatcctcccacgagaaaattccctatcccggtattgaggagaatgtagccaagaataaattgcaaaatgagcataacaacaattgggcggatcttaattctttttttgccgctgctcgcgatccacgcgaggcctaaaaacacgattaaaccgataatcccaatcaaatacttcatatgtgtttctcctttatttgtattcgcttacaatcactgtttcctcagaaaacggaaagcagtctgccttccgtcagctcttaatagttgtctccgcctgatgcattttctccttttacgatagaaacgcctgcgctggcgccaattcggcttgctccggcctctaccattgtgtctacatcttctttcgttctgacgccgccagatgctttcacgccgatatcaggtcctactgttttgcgcattaaggcgatatcttccttcgttgcgccgcctgtagaaaagcctgttgatgtttttacgaaatccgctcccgcagacaccgctaaacggcatgcacgttctttttcttcatcagtcagaaggcacgtttcgataatgactttgacaagcgcttttccggctgcagcttccactacaccgcggatatcagcttccaccacatcgtcttccttgtcttttaaagcggcaatattaatgaccatatccacttcagtggcgccttttgaaatggcgtcttttgtttcgaatgcttttgtttcagttgtattggcaccgagcgggaagccgatgaccgtacaaacgtcgactccagttcccttaagctcttttgcagcaagctccacccatgtcggattgacacatactgaagcaaatttgtatgttttcgcttcttcaattagttttagaatgtccgctttttgtgtatgcggtttcaaagctgtatgatcaattatgttggctaatgacatccttcgcacacttccttttttgttaagatattttttagcataaccgacttttgaacatatgtaaattggtaattgaaattttgttcaacgaaaggtttgaacgtgtcacaaatcattaacaagcgccctcgcggtatgctggtcaatgattaaaacgttggcatattttccggttaatgctccgtgaatggaagatacttttctgcttccgccggcaactaaaatggagcgttccttcagcctgaggtcttcaagctcaacaccgatggtccggtcattgatggcgctgctgcaaatattccctttcgcatcaaaaaagcgtgaacaaatatcccccacggcctgttttttcagcagggctttctcttcttcgttaaaatatccgagtcggaacaacagcgcttcatcacggacagtccccaccgtgaagagagcaatattcgcctgctttcccatctcgatgatccgctcaatatgacggtctttctccaccattcgcttcacatccgcattatcaaacacgacgggaagcggaagatagcgcggcatcgtttgaaaagcctctgcaaacagctgaatcgtttcagccgaatacgtgtttacccgggaatggctgatgccgccttttagctggacgacctcgacgccttttacctgcttcggttgcatgttttgcgcgatttgatacatggtggttccccagctgacgccgacaatgtcgccgtcttttaccgtttcatgcatatattctgcaccatagcggcttaggtcatgtgtaattcctgcataatcgggtgtcggggaaaacacaacatgcgcctcaaggagcccgtatttctcttcaagtatggaaccgagcgcatccaaatcctcaaaagggtccatgacgcgaatctggacataccctttttcctttgcatattgcagcagccgggaaacggttggccttgaaatgttgagctgctcagcaatttgctgctgactgtagtcagactgatagtaaagccttgccgcttctatgcttaattgttgtttttcccgatccattccgcacctccctgtggatcagtcctgataaaactgcttttgatttgcttttattatacaggctggcgccggctttcatccacctgatttctaagaaactgaaaaacgctctgggcgcggacctgcccagagcttacttctcccaagtcatatgctgataaatgcctttcataatggcgtacattccatataggatcaggcctaatgccaatatagacagaatcaatttgccatgcggctgctgcgcgagttcggcgagcgcgccgtcaaagcctcttgtgtcgtcgggatcagcggtcatggctgtcttgatgagaaaatagccgatggctgagaaaataatggcgcgggcgatattgcctgcgcgcccggtgtttttcgtgatgcatatcatctgtttgttcatttttgatgtatcgaattctttcataaaagcagcccgaacgcctttcataaattgaacaatcgcaaatacgataaaacccgcacccgtaagccctgtgagccatcggccgaatggctgcgccaatacataagcggaccacgtctgttctgaagtgccgccgtccccttggccaaacacaaatcgcaaggcattccaagcgatggatgtgtaaacggcggcactgaaaaagtttcctattctccgtgacaggcctcgcctgctatttccgtgcccctccgtgtccttgatcgcacttaacaccatccagattacatagccgataaggccgatgcctattaaaaaaagcaatagtgacccatacggcatgcgtgatagcgtttggagagctccgctcgaatctttggcgcggcctgccccggcagccgtcataaaagccaaaaccccaagcagaataaaaacgccgccgaatgcaaaataaccaagcctcccgaatcgtttgatccaaggcttggtttcctgttttatttttgacatgtaccggtctttcaccgccatgtgtccaaccctctttcacagaaatctttactgtaacattcccgattggacaaagttgaaacagcttctgcctcagctatggctggctgagatatgtttttgctgtttagctgattgtgcaggtgtcatccaagcagccgctgcggcagctgtgactccgcctgctaatttcccaatgatcatggccgccgccatttcttttttcattccagccacaaaaccgaggtggctgccgagtacaaaagcgccgctgaccgcaaacgcgacattgatgacctttcctctcggcgtcatatcctttaatgaagccagcattgggatatggtgcgccaaagaggtcaccaagcctgcagttgctgtctcatctaaatgaaggcatttccccagagcctgtagcggttttttaaaggtttttgtaataaaagccgtcattggaaacgcccctgccaaggcaatggcgatggtccctgttgtttgtatccctgtctcgacattctccattcccggaatcagcacaataccggtcatcgtttcaacggagacagctgcaagcccgataatcgcaaccacactgaccgctttcccgaagagatgaaacaactgaatcatactgtcggtgtatcgccataacccaaaagcgatcacagcagataacagactcgggatcagaaggtttttacctatcatgccgatgtcaaagcctgcgcataatccgccgattaagcaaccgatcggcactgtgcacagcccgattaatatgcctttcgcaaaatacggatgatcctctttttcgatgatgccaagagcgacgggaatcgtgaagacgattgccggtcccatcattgttcctaaaaacacccatgaaaacagcccggcctgcggatctttcgccatttctccagccagcgcatatcctcccatatcaatcgccaaaatggtgttcgcaaaggaagaagggtccgcgccaatcgctgtgtaaaacggagcaacaatgggaatcaggattgctgccagcacgggcgccagcgacacaattccgatcatggacagcgccagcggccccatagccttaaagccgtccgcaaaccgctcgcctagcccccatctgtttcccaaacaataatccgccgctccccatagtaaaaaggcagccaaaatgaatacaaccgtgtcattcaccgtcatggttttctcctttttcaaacgtatgattggttttatcatatcatctgaaatcaccgaatagagttgatcttattcaatatgagctaaaaattcttttatatcggctttttcaacggctgttatgatgctccgcgctttttcttgcgggaccgttaatgtcaatttttctattatgtcttcttcagacagctcatttcctggcgccccttttgggcagtccacacgcgcttcgcaaatccggccgtctgataaataggcccggacaatcgtgaaacggccttttggaacggcatgaggagccggctgaatagcattgtcatatacgcgctgaattcgccccattgtcgtttgaaccccgcttgggatcggctggctgctgaaatgttcaacggtcaggccgtgtccatgcaaagcaagagcaatcacatattcaacgctgaaacggccttcctctccagtttttggagatctttccgtcaatgcagcatctccgcctggcggaaatatcacttcaatacgttcggtattggcagcagaaatggtttcttcggagataagctgtcgtaccgcatctgcagcatggtgtgccgcggaacaaaatggatagattttaaaccatagacccggctgcacaattctccacggtgccccccaatcgtttagcaaagtgtgttgtgctttctcaacgtcaccgtacagactgaagaaaccagtttctccatcaaatgccgtgcgggacccgccaaattctgattgggccagcttaacggccagcaagccagcctgagccgccaaaccggcgtgcagcggtttcatttctgttccaaattgcaccctcatcccagcagattgcgtagccgcaaaaccaattgctttttccagctcttcctgagtcagctcctcagcataacctacggcgcaggcagcagcgatggcaccaagcgttcctgtattatgccagcccttttcatagtggcggctgccaattgattctcccagccgtgccatcacttcaacaccaacaatataagcgccaagaagccgctcgtcatgtccgcgagcggcagatgcaataagggccggtacgatgactgcactggggtgtcctcttacatcggagtggacatcatcaaaatccaatgcatgggcgataaatccattgagcatcgcggattgtaatggcgcggcctttttgccctgtccgataataggaacaaggggcaggcctccttcatcctctatcagacggaggagcttttgaattcctttatcttctcttcctgcgaatgaagcggcagtaaaatcaagtaatcccttttttgcttcgtgaatcgcgtcaactgaatgctcaggttgtgacgttctcacagcctctgcaagacctgctgtcagcccttgtttgctcatttgatggtctccaatacaataaccgccagctccgcaaagtattgagaggcaaccgtaagggcttcttcatccagtgtaaaggccggatgatgccactcctccgtcccgttcgttcccatccagacaaaaaatcccggaatcttctcttgatacagagcgaagtcttctccgcccggagactgctcagcgtgaacggtttgatagccaagccgtgccgcagcttcggatgccgcattcaaaaatgtgccgtcattctgaacggaaggcaaataaggaaaccacttgaattctgcttgtgccccatagcccgctgcaattcctttagccactcgtctcatatgctcgggaacagcctgcctcgcttctttttgaaaggttcgaaccgtcccttccatttcagcttggtctggaatcacgttccacgacgtgcccgcctgtactcttgtgatactgacgactgcgttttgcagtgagctgatattgcggctgaccacagattgcagcccgctgatgatttgtccggctgcagcgattggatcaatactgttatttgggatgccggcgtgtccgcctttccctttgatgacgatctcaaaccggtcaacacttgccataagcggaccttcctttacaccaatggttccgacaggcagatccggcttattgtgcatgccgaaaatcgcggaaatgccatcaagtacaccagcttctatgacctttcttgctcctgcggcaatttcttcggccggctgaaagataaagcggactgtacctttcagctcggcctttctttgattcagcaacatcgctgtgccaataatagaagcagtatgaaaatcgtgtccacatgcatgcattgtgccatcaaccttagatgcaaatgggagattcgtctgttcttggatcgggagcgcgtcaatgtccgctcgtattgctatcacggggccgtcttcccgtcctttgatttctgcaatcacaccagtctccaattgaggaacatcaagtatttcgatttgctcctcctcaagccagcggcggatttttttcgtcgtttcaatctcttgaaatgacagttcaggatgttcatgaagatcacgccgcatattgattaaacgggtatgaaacgttttgtcggccattgttcttctctccttcttatataagctctgcaggctctcccacctgcttgataaatcgtttcgtccgttcgtttttcggatggtcaaacaattcctctggcgttccctgctcgataatatggccgtctgccataaaaatcactttatcagcaacctcttttgcaaacgccatttcgtgtgtaacaatgatcatcgttgtttgtttttccgcaatggacttgatgacctgaagcacccctgtgacgagctcagggtcaagcgctgacgttggttcatccagcaaaatcgcatgcggattgaccgcaagcgcccgcgcgatgccgattcgctgctgctggccgccggacattgtgatcggatagctatcagccttatgctccagaccgacttgtttcagaatctccattccaatacgtttcgcttcgtcgcgtggtttatgttgagccacgattaaagcttctgtaatgttttgcagagccgttttatttttaaacagattgtagttttgaaagaccatggccgtttgctggcgaagccgatatgcttccttgcgtgtaaacttttccgcgttcagtttggcttctccgatttcaataagtccttgatccggacgctctaataaatttaagcaccggagaagcgttgactttccggaaccggacggaccgatgattgccaccacttctccgcgtttcacttctagatcgattccgtcgagcacgacgagatctttaaacgctttgcgaatattttttactgttatcaactgatttcacctctaagtccggtatggcttgctcatggcacgttcaaacaagtcctgcaacatgctgtagatcatggtaagaacccaatagacgatcgcaaccgccaagtacgtctcaaaatatttgaggtttcctgaagcgtacatcttcccttgggcgaacatctccatgacccctaatgtaaaggccagtgacgtttctttcaggagcccgataaatgtattgcccgttgccggaatcgcatttcggatcgcttgcggcaaaataatccgtctgtatgcctgaaattttgtcataccgacagacaggcacgcctccagttgcccgtcatcaacagaattgagggcagcccggaagatttctgccaaatatgctgcattttttaagcttaacccgatgatagcggctgtgagagctgtcattttgctcatctctggaaatagctgcggcagcccgtaatagattaagaacagctgcaccagtgtcggtacgcctcggaaaaaggatatatacagctttgacagctgatgaagcactggaattttgttctttgtaatgagtgcgagaataagtcctccgataatggcaaaaatcatagctgctatggccataaacaacgtgatcggaagggcctgaattaaagtcgggaacgctgatatcatgaattcccaatcaatcgtgttcattctggtgagtcaccgccgtttcttaatgcttctgttctactgtgatatcttcattaaagtatttttcagagagttttttcagtgttccgtctttacgcaattcatctagcgccttattgacttttttgcggagcttgtcgtgcgcatcgtccttggcaaatgggaatgcaacctgttcgtaaacaatcggatctcctgcaagctttaatggcaaaccggtcttcttgatttgcgcgatcaatacagttcggctgttgacataagcgtctacacggccgtacgcaacatccttcagcgtaccctcttgtgtttcgtacgttttgatattgatttttttatcaggatctttgctttcaaggtttttcgcgtggtttgaaccgagaacggctgcgactgtcttgccttttaaatcgtctactgatttgatgtctgtattgtcttttttgacgacaatctgtgttcccgcataagcgtatggtttcgtaaagttatacgtttccttacgttcgtctgtcacagctacctggttagaaatggtgtcaagcttgcctgtttgaagctcccccatcagcccgctgaattcaagcagcttccagtccagtttcatgtcaattttcttagcgaccgcttccatcacttccacgtcaaaacctgtcagctttccgttttctttataagcaaatgggtaactttgtcctgtcgcaccgacatgaagcacattgtcatcctctttactgctgctgtttccattgccgcaagctgagagcaccgctaataatgcagcaacgaccagcacaatccattttttcattttcatttgattttcccgccttttctttttttatagatcatgtcgcaattgttttttcatatagactgtgatatgcccttttccaaggtcttgttcacctgagcggacatacccttttcgttcgtacatctctatcagccacggatgcttatccgctgttccgagtgagacaaacggaacctttaacgtatcgcgaaggattgtttcctccagccattgaagcagctttgttccgattccttttttaccggtgtcggggtccacagcgaaccaccagatatgcggaacgccatacggtcccggctgttttccccaaggcattctcaaggtgatggtcgcgatgatccgcccgtcttcttccatgacgtagcaagcgtttttccgaatattttgcagcaccaaatctaaatccgcatgagcagcagcaaaacgaatgccaagctttcgaatcggttcataagcccgcaatgtcagcgcgaggagctgttcagcatcacgttcaactgcaaggcgatattgtggcttcatctagcgttcctccttactttgcatagcggtttaccggcttttccaaaccgaagtgctctcgtaatgttgtgccttcatattcttttctgaacacgccgcgctcctgtaaaatcggaactacttgatcaacaaacacttcaattccttctggaagaagcggaggcatgatgttaaacccgtcacacgctttcttatccacccattcctgcatcttgtcggcgagctgctccggcgtgccgacgaagatatggtggcctctggagcctgcaacgtatttgtaaagctctcgtatcgtcatattgtccctttcagccatttcctgaacaagcttgaagcggctcttcaccgcattagaagcttctgcgtcaagcttcggcagcggcccatcaagcggatatgccgacaaatcaattccgcctaagtaattttggagaatttgcagaccgacagatgggataatcagatcttgaagctccttgtatttggcttgcgctgcttcttctgtatcggcaatgattgggaaaatacccggcatgatggcaattttttctggatcacgtccgaattccgctgcctgttctttaatggattgataaaattcctgagctgattccaggtggttttgtgctgtgaagatcacttctgctgttctggcagccaacgcttttccgtctcctgatgatcctgcctggataatgaccggctggccctgcggcgttcttgaaacgttcagaggtccgcgaaccgagaaatattctcctttgtggttcagctcgtgcattttttctttgtcaaagaattcacccgtttctttattacggataaaggcgtcctcttcccatgaatcccaaagcccctttacaacttcgacaaattcctctgcccgctgataacgcaaatggtgttcaaggtgcttttcaccgctgaaattcagcgctgttgattcaatagatgaagtgacgacgttccatccggcacggccgttggacagatgatccaatgacgcaaactgtctggcaatatggaatggctcgctgtatgtagtggaggctgttgctgtcagtccgatttttgatgtgacctgcgccaaagcagagagcagggtgaatggctcaaaccttgttaatacatttggatgtgatttgctgtcaattgaaaggctgtccgctaaaaacagcatatccagcttgccccgctccgctgttttcgcaagctctttaaaataatccaaattcatgctcgcatctgagggcgcgtccgggtgccgccaagacgcaacatgatgacctgtacctgctaaaaatacccctaatttgatttgtttctttttgcttgtcatgacgatactccttttatcatgtttttaggctgaataatccgaaaaataaactcctatattcctagtcgtttaatatgaataaatcaaaatgtacctttgtcttggacgtttgtcaatgagttaagattaattttttctattcaagcgaaaagacccttgcgtgaccatgagggaacggcattgattcattcaactagtgcaacctctatatcggcaagaaaactgagtctaatgaagcaaagactcagttttcacccaagaattttatataagatttcgccatttcctttgccttttcttcgcttttgcaaaccgcctatccattcagacgccgtaacgattgtataaaaaaacagctgactccagatattcaaacgggaatcagctgattgatgtgaattaattaagctcatgaatactttcttctgctttagcagaaaactctttaggctcaaggcggtctaggtcttcatgaaataaactcactttttggatttgccgattgtcatagtggtggaaatagtagtttccagtttcgttgcacatcacggaagtatattgcgtataatgaatttcgtcttcttccgttatcactgcgccctttggtatcgtcatatttgccaaaatttgaaaagcggctgttacacctttcgtttcatcggccgccggctctagatgttctttcaaataaacagctctgacaaaccgggaaggcggtgtataatcccccggcagaccaacagttcctaagccttggccaaaagcagaaagggctaatccgcccatctctttgctctctaattgcttcggtctgattcctgtatattgctgcagattggttacatgccatataaagtcggggctgttcgtcatgacaccaggttgattatcatagactttgaggccgtctgctcttggttctatcgtcaggcttcggcccgtccggtctgacaatatccagtgaagcggtaaaactgtatccaatagatctaattttttctctacaatcgttaaagatcgaatcttttcttttacgtcttccaaagactgacagactgacagcacccatgtcacaaactcatgcgggacaatgtgaacggtatcttcccgtatcgttttttcgtactccgcatagcccggaaaataaagcgccgcacaagataaaccgctttcattaacgccgtcggcaaataatatatttccaagttttctccccataccgataaacgcgtactgtgtctgatgggcctttccgtcagcttcactcttccagctgtaacggcgcggatagagaatgacctccgtccccagctgaaatgcaaaatccattgttctcgctaataaatgattccggtcagcagtttccaatgtaagacttgtgcacatttgatcagtccccttttcaattcagattaatatcatacatattgtgaacgaattggttttatcagcataacgaaagtcaaatcgattcgtcaaagaattgacattacatcaaataaaacgaaaaaatccagccttctaagaggctggattttttattatttagccaaaacaagctcgtgaatcgcatgtgcaacgccatgttcattattggagcgcgtttgaaagtttgcggcttccaatacttctgggatggcgtttgccatggcaaccccgcagcccgcccattcgatcattgtcaggtcgttcccgttgtcgcctatgcacatgacttccgcctgttcaattccaagcagctgtgccagctggcgtacagcatttcctttgctggcttccgagtgcagaatttcataaaagaaaggcgcacttctgaccattgtatatttttctctcacttctttcggaatcgatgtaatgacgcggcttaagttctccggtttatcaataaacatcactttcgggatgaggatatcttttggcacctcgtcaattttgcggaaatgaagcggcacctgtgtcacataggattcgtatacggtaaattcgctaatgtcccggttaggcgtatacaaattagatgagtcaaagaaatgcatcggcgtcttcagctctaagctcaggtcatataatgaagccaaatcatcataaccgagagacagctctgagaccacttcatttgtatgcgtattttgaacaagtgctccattatacgcaataacatagtcgccttcttcaattaaattcagttcatctaaatatctctgcacacccccgataggccggccggtgcaaagcacaattttgacaccttccgcttttgccgcgtgaagggcgtcgcggacctcctctgttacttcatgatgatcatttaaaagtgttccatccatatcaattgcaattagtttgtacatcctgcatctccttcatgtcgttttcaggctatagtcccatcatatcgttttttctttttgatattcaaccggaagagatggttttctccggattctgtttagacgccgcccttgtcttcggatacgcaagcgcggtttccgctttctttctgccttgacgccgttttctgcttttttctgtttcatcagcagaaagccggcagctagaaaaggaatgccggttatattcaagatggcaagcttcacacccgccgcgatgaaaaagaacccccatgaagatgatggattccgtctgatcatgacgtaagccgccatttccagaacgatcaggatggcatgaagcactatgccataaatcagcaatacaagggcaaaaaacaaaacataattcacgattgcccctgagtacatcatagcgcgcatcatttgtataaacgataaggactgcatggagccgctgatgacattagggttatagatcgtatagtcactaaataaatgtttgactttgagaaaagcccataatataaatatccattgaatgatatgtaaaacaagccccgctgccaccagtctttcagctttttgatttctcatctttctcctccctgccggtctttgattcgattcttgtcatcgtttttctctgtccattttgctcccatatcaatgtcccgttttctcctcttttcagcgtgcttttgagcggataataggggccgaggtactgaatctcgatagacccgtcagtgctttgggaaatcaccttgtatgccataaaaggcagctgtacctctcctcttccttcaatcacttccgtttccacaacctcgtcttcggtaaatgtgactgttgctgatttcacaccgtccgttggcccgggggcacgcccctcatcccacgttccgtaataaaacggcgtctcttctttttgctgctggcagcccgataccatgatgcatacagcaattaaaaacaaaatgccatatttgtttctcaaggggatcaccattctttcctccttttttgggcgaatgccgtgccactgtgccaatgactacataagttataaggaattcacccacaaggagactgatcacatgaacccttatcaatattacagccctcagctgcctcagcaggaaccttactatagccactatgagtacaatccttatccgcagcaggatgtatacgatccataccaaatggacagacagccggcattggaaagaagaatcgcagcacttgaacggcaaaatgaacagcagtcaagagaattaacccgtctgacaaacgaagaccgccgtcaaaatcgggaaattgcacggattgccgaacaggtcaatcagttaagccaggctgttgaacgccatacacgccgcctaaatcggctcaatcagcgcctccgtacagtagaaaaccggctgaatatcccatttactgcaggggaaggcggtttctgagcgaaacaaagaaaaaaagcggaatacgattctcccatctcagggtttcgttttccgcatttcttatatgttaaaacggaacatttacataaaaagggtttgtacccagtatacaatctttaccgttttcattcaaagatagaggggctgaggaaaataattgtagttcctctttgacggaatttcttttcattcaagttgcatgataataccgactcacgtcaatcgatacatggagggatcattcatgcataatacacaacacggcttgcagcagctgaaccaatgccgccaaactgctcagcagctcattcagcaaacacagcaaagcagccagcaatatcgccaaatgcttcatcaggaacagcaaaacatccaaatgctgcagcagattctaaaccacgaacaacaagctgcacataccattcagcaagcactgcacgggcatgatatggcgattcaaaagtgccagcaggttgtcaacatgtgcaaccaaatgcaacaggaacttactggacaatccagcgtcatgaatacgaatgtgtctacacttccattcggccaaaacacgccatttcagcagcaatcctatcagcagtaacatataaaaagctcaacacaatgcgagtgttgagctttttttcttactgttctttgcgaatatgtatatcctgaatagactgtttcggtgcatgaaatctgctctcggcttcacttcttgcctcggcaaaagcccgcgcctccacatgatctttgtagacatccagctgaatcaaatacagcgggcgcactttaaatccatgaataatggtcaccgcccataacgggaccacaataaaaacaccgggcagatcgggcaaaacaaaaccaaacgcaaaaatgaaaaaataaatgatgccgtacatgatccactttctatttctaaccttgatgccaataaataaaaaggcaaaaaaactggtaatggcaaaaggcatgaaaataaacagcatccaccagctatgcagccattcccaagcggaacctctttttgtaattcccatatttttctcctcctatttacctataataatcgattaggcataccgcgtcacccataaacgggaaaaactttctcccttaaaaatagtgatagacggggaacaggtttcttgctatattattaattgataatgataatcattactaatctattgagatacatagtgggagggttcttgatgaaaaagaacatattgctcgtgggcatgcttgtgctgcttctcatgtttgtcagcgcttgcagcggcacggcttctaaagggagctcaagcgattctgcttccgaaaaaacagaagtgagaacatacaaatcaccaaaagggaacgtcaacattcctgcacatccgaaacgcatcgtcactgatttttatgccggtgaattgctgtctgtcggggccaatgtggtcggctcaggctcatggtcatttgataatccgtttttaaaatcaaagctgaaaaatgtgaaggatgttggtgatccaataagcgttgaaaaagtgatggagcttcagcctgacttaattgttgtcatgaatgaagagaatgttgataaattaaagaaaatcgctccgactgttgtcataccttataacacagcgaaaaacgtagaagatacagtcagcatgttcggagatatcgccggatcgaaagacaaagcaaaatcctttatggctgactttaacaaaaaagcggaagcagctaaaaagaaaattgccggcgtcattgacaaagatgcgaccttcggcatttatgaaaacacagacaagggcgaattctgggtgttcaatgacaatggcggacgcggcggccaagctgtatacaatgcacttgggttaaaagcgcctgaaaaaattgagcaagatgtcatcaaaaatggagagatgaaacagctctctcaagaggttattcctgagtatgccgcagattatatgttcattacggattacaacccgaaaggcgaaagcaaaacactcgacaagctggagaattcctctatttggaaaaaccttgatgctgttaaacataatcgcgtgtttatcaatgactttgacacgttctacccgtacgacccgatttctgtcagcaaacaggtggatatcatcaccgacatgctgatcaaacgggccgaagaaaataaaaaataaaaaaacggcacagtcatgacgctgtgccgttttttatgattcactttaattttgattgtacggagtccggcatatcttcaaacttgacttcttcccaagtctcgacatactttcctttcgccttcaccttcaaatacgcgttcttccgaagctctttgccggcgaaaaaggtcacttcttctttttttccggatgcattatatccgtctaatgtatattcagtaccgcccggactaagatgtctgccatctcgatcaatctgaacatagacatcttgctggtgaataaacggattaaatctgtctgtaacatcgttatgaaaaaagagaagcccgcatattacggcagcagccgccaagacggccaggattgccattgcttttttcatctttgcactccccttacttgttcatttttttcaaatagcttgaccgcaccgcgaggaagaatagaagctgaaaaatgaaaaaccctccgatggtgagactgagcggccccgcgacatcagaatagccttccacagccaatgttctcaaggcaaacagtgtatgcatgacggcaatgacaaatggaaagaagaaaagaatggccaattgtattgtcacgctttgtgccatttctcgctcactcagaccgattttggccagtgaacggtagcgctcccggtcttcatctaaatcagtgaacagcctgaaatataagaaacttgctgccgcgacaaagaatacaattgcgataaacaggccgataaataaactcaggctcggcagctgcaccgtatcatagtaagtcccggcttttgaagcaaaatcagaatgcacgtcgatataattgccgtaaatctcattttgcaaggattggctgatctcaagactgtctttccaatgatcatagctgtagccgtataatgacgcttgatcaccgagtgatttcagctgatcaaaggtttgatcattcaccgcgatgatagcattcaatgagatcagcggttttttgacttcttttaccgacagtttttgatcagacagctcccctttttggttcagcagcttcagctgatccggcgcttcgtttttgaaattgcggtcatacgttcccgggaaatagacagcctcgtcttctttcaggccgttcactttgacatggaagtattttgccgcatccgattcactgatcatgtaaacagggggaacagtttctccttcctgatagcgaacataggaaacatctattttgtctttcttatacgtaaagccgtgtgttttcagttcatggtcaatatctttcaaatgagtctgttcttttggattgttgctgtaagataaatactccatttcataagcggactcttccgctccgacggtcgatttgtacattgcgagcacgcctgtcgcagtaaacgcaaccgcggaaataatgctgacaataaagaacaggcgggcgttgtcttttagacgatagacaaggtcagaaacccaaatgatgtttttcccgcgcagataaaaggttttccacttcttcagcgcgcgcagaatccatatgctgctttggctgaaaaagaaatatgttccgataacggtgagcagtaaaatgataaacggttcggccccgtggacattgcctttaagaaccatgccgtacccgccgcacagacaggcgatgccgaataaggacagaagcacggacggcttaggctccggtttaaccttgccagtgccctttattaatttgataaccgtatttgatctgacaaaaaggatcgtaaactgcgataaaaagaaaaataagagcagaaatccgcaggccgtaataccgagcgctttccaaggcatatacaaaggcagcgcgtccatttctaaaatataagcgccgaccgtaaagaacgtctttgaaaaaatgaatccaccgattatgccggctgcaattgacatgacgccgatgatcatattttccgcagtaatgagctttctcagctgccccggcgtgatgccctgcatgagcagaatgccgaattctttatttctcgatttcaaaaatgcattaaccgaatacagaacaaataagaaagaaaaaacaaagatcatccattccgcggcggttaagccttttttggcgatgttattcaggtagccttcctttaatgccggatgaaacaggaacatcgcaaaggtaaagaaaatcaaaacggaaaaggcgctgcttaaaaagaatgcaagataagcccttttgtttctcgtgacgtttttataagcgaactgaagaaaggtcatttgcgtttccccccagcatagacagcacatcaagaatttgttcataaaagacttggcggttttccccgcggtaaatctcattaaacaattcgccgtcttttataaagatgacgcggcggcagtagcttgccgaaaccggatcgtgggtcaccatcaaagccgtgacatgatcatcccgattcaggctctgcaacgtttccatgacgtcttttgtcgctttggaatcaaggtttccagttggttcatcggccagaatgagtgacggcttatgaatgaccgctcttgcgatggcggcccgctggcgctggcctccggatacttcaaacgtccgcttgttaagcaggttttcgataccgagctttgccgcgatgccgtgcagtttttcttccatgacagacggcgcttctttttcaagcgttaacggcagcatgatattttcaccgatcgtcagcgtgtctagaaggttgaaatcctgaaacacaaatccgagctgcttgcggcggaaatgagcgagctttgtccgcttcaggcgatgcgggttttctccgttaatcaggatatcgcctgaatctggacggtcaatcgttgaaatgatattcaaaagcgttgtttttccggacccggacggccccatcaccgccgtgaactcgccttcttctattgaaaatgaaatttgctttaaggcctgataggacacttgtcctttataggttttatttatatgtttgacttcaagcatattcgccatgaaaatcctccttatggttttattcttgttgatctgggctgctttcatgtagtgccgggacgttcaacataaaaatccccttgacataaatccatgttatcaaggggaaacaaagcgggctatgttgttttcttaacgcagccttacatttttgtaagaaatgaaaatcgaactgatgtcccttcaccgggagacgagctgatgtccaccgtatgattgagcttatctgtaatttctttgacgagatggaggccgattcccgtagattcttggaaacgccgcccgttttcacccgtgtaataagggtcaaacacccgcttgatgtcttgtgagggaatcccgacaccgtaatctttgacttcaagcaccgtcctgtcttcatcgcggaagacattcagctcaagtctgtcactcttgcccgctgaatacttgaccgcatttgtgaccacttggccgatcgcaaatttgagccatttggcatcggtgtaaatctgatgatcatcgcaaacgttcattttcggataaacgcgatattgaataaaaaatcgtttatagctttgaatgactgattggagaagctcggacagggaaaccgcttcgattttaaaatcccgttcaaacaggtcgagccttgaagaataaagaagcgtctccagcccgaattcaatctgccggacttcttttttgatttgttcaaaaacgggctcatcctcttcttgaatgattaaattaatgaccgacagcggcgtcttcacttggtgcacccattgattcatatacgtcacccgcgcgtcaagcttggcttcggtctcatggagcttctggtgctgcagccggatcagctccatctgcttttcatacagctctgaacagaacactgaagaaccgagatacgggatatccgtcccttcctgccccgagctgagccaatgatacacgccgcggtctttgtaccagcgataggcaagatagcccgccaaaataagaagctgcacgcccaatatgtaaaacaagtgagaaaaagaatgcagacccgcaaaccagtaataaaagaagacaaacagcccttgaaggagaaaaagcagaatcagcactgcatgagaccggagaaacagcttcatgactgcgccctcagctggtagccttcgccccgcaccgcttcaatagaaacaggcgcattcagctcccgcagtttttttctgagccgcgtgatatacacgttaagtgtattatcatcgatgaatatgtcggtgtcccacgtcttttccatgagacggtcccgactcgtcaccttttctccccgctcaagcagcacttccaaaagcttgctttcttttttagaaagctcgcttttttcatcctgaaaacgcagttcaaaccgttccacaaagagctgaacgccggcatattcaaccactttctctccctgctttgcggcgtactccccgtacgccctccggatctggcttttgattttcgcaagcacaatatcataagaaaacggtttttcgatataatcgtctcccccattttcaatcgccatcacctgatccatttccccgcttctggcagaaataaagatgatcgggcttgtggagtgctggcggatctgccggcaccaataatatccgtcatatgccggcaaattgatatcaagcagcaccacatcgggcttttcccgcaaaaagacatcaagaacagctgtaaaatccgcggcgaccactgtttgatatccgtatttttcaaggtaattctgcaatagtccgcgaatgtcttcactgtcttccacaatcataattttattcaaactgaaccactcccgtttcttacactgctgccatcatcataatcgttttgggcgtatggacgcaacaccgcacaaaaaaaccgccatctcggcggtttctgatctctttagccgacctgctgcttagctgctttaccggctgatccgaactctctcattttgcttcgcactgtctcttccacggcttcaatgccgggtgtcaaatagccgcgcggttcgtacagatcgctgttttcctgaaacatgcggcgtgtttcgtctgtccacgctaccatacattccgtattgatattgatcttcgcgtggccgagtgtgatggcttttttgatctgatcctgcggaatcccggatgccccatgaagaacgaggggaatatcagtcatgcgagagatagcctccatttccttaaatccgagattcggctcaccctgatatttgccgtgtacagagccgagggcggcggccagcgcgtcgatattggtttctttgacgatccgctcacattccgcgatatcggcatagcggaccccgccgaccaggccgtcttccattccaccgaccgtgccgacttcggcttctactgacacgccgtgttttgcggcataatcggtgacttcttttgtcatcgcgatattctcgtcaatcggctgatgggagccgtcaatcatcactgagctgaatccggcatcaatggcctgtctacagcgttccgcactgctgccgtgatcgagatgaagcacgaccggaacggtaatcgccatgtcctccattaacgcgccgaccatggcggcaatcgttttaaatccgcctaaatagtcgaccaggcgatcggaagccgcggcgatgaccggtgattgctccttttgcgccgcctgcaaaatcgccttcgtccactgcaggccgttgatattaaactggccgatcgcatactgctcccgctttgcatcttcaagaagctctttcatcgatacaaaagccatgtccacccctcctttatccattacatgttgaagtattttgatacgacgtccactgttgtttttttcgctgtttgaatggcttcctcagcagtcagcttatagtattcaggccggaatagctcaaccgatacaacatcagagaagccgatttccttcagtgctgataagtgggcatctaagtcaattgccccttgtcccggccatacacgatcctcatctgttaaaaagccgattgggaaatcttctgtatcatcgatatgatagatgaagattttctttccgtccgcctgctttaagctctcaatatttgaacccattgcatggaagtgaaaactatcaaggacaagcccgacattgtcacggttaactgtgtttacgatctcatacgcctgttcaaacgtattgaccgtacattgcggatggccgacaaattcaagcgcgatttttacgccgtacggctccgcgatatctgacagctcagtcagcacctctacactgctctttttgatctcttcttttacaatcttctgctctgtcacaagcggaacggccaccacatatttcacaccgagggttttgcatgtttccatcatgcctttaaattcagtgatgatctcgttgtggcccttttcatcacggttgttgaagaaaacaagcgcgtttagggcaagcggtttgatgtgatgggtttgaaaatattccgcaagatctgccaatgaatgatcttttaagtactcgggcagcttatccattgtgcggatttcaatataatcatagccgtgcttttcgcatagttctaaatcctgtttaaggtttgagttttccaatgttgtcgcttcattaaaacaaagtttcatgccagactcccccatctgcgttttagatatgaagggagttcggcaggaaggctgtcgccatatcccgccgaactccatgctcagcttatgccagacctaattcttctttcattttcttaagcataaatcggcttgattcatccgctctttcatcgacccaagcaaatacggcattcgtcgcaattccgtcgaacttcatctctctcagttttctgaaaatcgtatcaaaatcaacctcgccttggccaatgtccaaatgctggtgaaccgttactttcgcgtcaggcggattgacgatgtagcgaaggccatgagccgctttatgattataggtatctgcaaataaaacatgtgtgaggcggtcgccggcttcgtcaaacatggtctcgatgtcgcctttgccgtcatcatagaagaacgtatgcgcagtcgagtagacaagattgatccaatccttgtcaagcgcgcggatcatatccatcgcacctttgtgcgtttcgataaaatcgtatgggtgggcttgaagattaagtttaataccttctttttcaaagactggcagaagctcatccatggatttgataaatttttcttcacttgttaaaggatcatattttgaaccgctgaattcgctgttcatcaaatccacttcaagttcaaccgcaatttcgattgcccgtttccaattgcgcaccgctgcctgccggcggtcttcatcaggacccgcccagtggtaaagaggaagaagcgatgaaagcttaacacctgtatctcttaaaaggcgctttaattgtttgatctttgctgaatcaactttcggatatttataaaacggacaaaaatcctcacgcggagacaattcgatatattcatagccaagctccgccgttttatagaccgtttcctctaaagttaaatcatcacgatacatggatggatccaatgctaacttcatattttcactcctctgttttttagttttgaactgttgtaaaagattgatagaattccggtttttccttcaattcaaccttttctttttgtccagattcctgggcttttacacacgcgtcagtcgtgacagcagcaatatagccgtcccatgccgtcggtccgctgacctcgcctttcttttgaatcgaatcaataaagtcttggatttccacatcatacgcagcgacaaagcgtctctgccaatccatcaaaatatcagtactgaatctgccttcttttctcaagctgatgcttgatggctcgggaagcttgatgatgccgtcttctccgacgatttcgcattgaatgtcatagccgtatttacagttcacatagatttcagcattgatgacgataccgccttttgtttcaattacgacgatttgcggatcttttaaatgcggcagcgcgtttttcgattttttcgggtagatgacttgaacggactcgtagtcatcgttgacgagccagtgcagcacatcaatttcatgaacaagcgtgtcgactacggccatatcggttgtgtagttatctcctacagtcgggttgcggtgcgcgcagtgaatcataagcggttcgccaatcacatggttatcgagtgcttccttcagctgtacgtaaccgctatcataacggcgcatgaagccgacttgaacaaggcgtttgcccactttgatttcttcttcgacgattcgcatgcatccttcagccgttgtcgcgagcggtttttcacagaacacatatttctgggctttaatggctttcagcacgcttgactcatgcgcaggcccccagcttgtcactaaaacagcgtctacattttcgtctgcaagcaagctgtcatcattcggataaaccgtcgcgtttaattggtattgctcaacgaccttttgtgcagcttcttgattaacatccgttacagctacaatttccgcgccggacagcttgttcgtgatgcggttaatatgttcttttccgattgctccagttccaattacgccaatacgtaaactcattgacagccactccttctgttgattacataattttgctttctgtttcttgctttacttggctctgaggagatccgtagagttcctcttgaatttgttcaagcgacttgccagacgtattcggcgcaaagagcagcccgatgatcatactggccgtcacacatccgagaagaattgcagccatcgttccaatgccgaaattggtgataatcattgggacaaacagactccaaatccctattgaaatacggacaaggaaaaacatcagcccttgtgcggaagcacgatattgcgtaggaaagatttcactggcccataactgatagttcgcttgctgccctgctccgttattgatgccgatcacgacaataaacaggagcagaatcggcaggccttcaattggcagcagaaacagtgtccacccgatcaccgccatgaaagcggcgattccaaatacggtttttctatatttgtcggcaaagggcatgaagatcaaggcgacccccaatcctgtgaagataaacagccccatttgcaaaaggttggccatgttggcagatacaccgccgacctgctgataaatgtatggcataaagaagcccatgaccccggcagctaagttccaaaccaagtacacacccatcaaaaacaatatgctttttagatacataggcttgagcaaatcaaaatacgatgtcttattcagtacagccggcttctctgcctgagcatcctccggctgattttttgtctgccaggcgtctgattccggaagcctgattctcaggatgtacgtaatcagcgcaatcacaagcagatgggcaaatacgattttattccccaagagtcccaagtcaccggccagtacggagagaagcagtacaacgacagcgcccgcggcccaagcgacttgtgctacgccgcaatgcctggcccgattcttctttggcgcattttccgcaataatggtccatgacgcggttatatcagctcctactgataaaccgataatgatgtaaccgcttaacaacatggggaaattaaccccgaacaaaaccaaacaaatccctagtgcataaaccagcatactattggtataaacagccttccgtccgactttatcagccagaaacccgccaagcagcgcgccgacagcggcagaaatcgcattcgcgctcagcgcgccgagcagcccgatttgcgtatcggatagcttaaggtaactgacccataatgataaaccggcggagcctgccacaattgaaccggcatcaatatagttggccaatgctgccgcgattgtccgtttattgaaggctgaatctccattggtattgcccatatgttcattccccattaagccagatccaacaactgctgatcaatatagtttctcgcaatcaatgcatactccagcgggtttgcaacatcggggtcctgttcagcttcaatgacaatccatccggaataactgtgcttcaacagcagctgatatacttctctaaagtcaatgcagccgtcaccgggaaccgtaaacatgccttttaaaaatgattgccggaacgattgtccttcgagcctgcattgttccatgacattcaggcgggcatccttaaagtgcacatgcttaatgcggccgatatgcttctcaagcatccccatgtaatcgccgtcagaaatatacgcatggcctgtatcatagaggaggtgtacatgcgcagggtctgttcctgccatcaggcggtccacttcttccgctgtttggacaccagtgccgagatgatgatgatagacaagcttcaagccatgctgagcggcaatttcgccaaggtgattcagcccttcgcaaagccgctcccattcatcatccgtaaagtgcggcttctctgtgaacacatttttctccaagccttgcacgctgtacgtttgttcagagacaactgcgacatccgcgtttacttgctgcaaatactcacaatgcagggtaaatgtctttgccgcttcaccaagtccgtcacgcaaaataaaactgctgaaccattttcctgcaatgcgtaagttccgaagcttcagctctttgttcaggacggcaggttcggggaaaaagcccccgacttccgtgccttgaaaacgtgcgacaacgatatcacttaacaaatgctgaagtgtatttcccgctccaatttcaggcatgtcatcattccgccacccaatgggagcgattccccacaggatttcatttttgcccatcttggtgcctcccctctaatactgcttcgcagattccagctttttctcttttgcttcgtatgccttctgaacgctttcttgttcagatacctctgccaccccgacatgccaccagctgtcatagccgtccgtcattgttttaggcagaaccttcatttcaattaatgttgatacatcctgtttcttcgcatcctctaacgccgcttttaattcttctactgtgtttgcacggtaggttttcgcgccgtatccctcagcgactttcgcgtaatcgacattcaggatttggttgtcatctgtgcggaactcgcaatagtagctgccgctgccgtgatccatttgcaggttgttgatgcatccgaatcctgagttgtcaaagagcagcacattgattttcttgttgtattgaatcgccgtgatcaattcagaatgaagcatcaggaagctgccgtctccgacgattgaatacacttctctgtcagggtgggccagtttaagaccgagtgtcccggacacttcatagcccatgcaagaatacccatactccaggtgatacgtattcggaacattagaatgccacagacgctgcaaatctcctgggagtgagcccgctgaacagatgatgacgctgtcttcaggaatcgtctcgttgattgtcagcaatgccgttgtttgcggaagctccgtattcaacgcgtcagcatattcattcaggacctcttgagaaaaatgatttttgatttccggatcaaatgcttcccgcttaaacgtcactttgctgagacgctcgcgttcagctagccattcgtccttcagctcccgaatcgttgtgccgaactcgctctcatagccttcaagcaagccatgcagtttgccaagcgtcgctttcgcatccgctaccacttggaatgcatcaagtttatacgcctgcattcggctgacgttaatgttcaaaaacttcgctttatcaaaatcaaaagcggtcttagaggatgtcgcaaaatctgtataccttgtgccgatgccgataatcaaatcagcttggcgggccgctttgtttgccgcaagtgtacctgtgatgcccattccgccaaggttgttcgcaaaatctgcctcaacagtagactttcctgcctgcgtttcaactaacggaatgttataggcttcagaaatggcaaccaattcatcgcgcgcaccggaatattttgcgcctccgccgacgagaatcacaggttttttgctggatttaatcagctccgccgcaccttgaagctcgcgctcgctcggctgcatgcgatcaatatagtgaacccgtttgacgaagaaactttcatcaaaatcgtatgcttccccttcaacatcctgagaaatacaaatcgttgccggacctgcttttgccggatcagtcatgacttcaaacgcgcgcagcaaactgctcatcagctgctcagggcgcgtaatgcggtcccagtatctcgatacaggcttcaatgcatcgtttgtcgtaatcgccgcactgtattcttgctccatttgctgcagtacagggtctggctgtcttgtcgcaaatgtgtctgccggaatcaagagaactgggatattgtttgccaatgcagtgccggctgccgccaccaagttagccgctccaggtccgacggatgtagacaccgcatatatttttcttctcagcatttgcttgctgtacgccatggccgcatgcgccattccttgttcatttttcccttgatagactttcaaatggcctgcatcctgctcaagcgcctgcccgatccctaatacgtttccatgaccgaaaatcgtgaagatcccttcgacaaaaggctcttcctttccatctacatggatgtactgctggtttaagaatttaatcagcgcctgtgctgttgttaagcgaattttcttgcccacaaacgatcccacctttactcgatctttttcaattatgactgtgcttcaataagctgtacgatttcatcagcagtcggcatcgcttctgacgaactgtgcttgctcaccacaatggaagctgaagcactgccgtatttcaatgccgtttcgatgtcttttccggtgacaaggccatagataaaggctgacgcataggagtcaccggctccaaaagttttcagcacttttgtcttgtacgcttgagcgcggaatacctcgccggatttgctgtatgcgtaagagccttcgacgccgtgtttgatgacaacgaggtcggctgaatggccaaataaatgattgacggattcttcattgcttccgcctgtgcggttttccatcacatcaaattcatcgcgtgtgccgatgacgatatcagactgctcggcaaccaaagaataataaacggctgtttcatctgatgactgccacgtatacgggcggtaatccagttcgaacaccactttaacctgatgcttcttcgcgtattgaacagcttttaataccgcttcccgtgacgggcttttggcgagcgctgtcccggaaacaagcagcattttcgcatttgcgatatagtcttcgcttacctctgaaggctcaagataaagatccgccacatcatcgcgatacattaaaatgctgcattcttcagggctgaggatttctgtaaatgcaaggcctgctttgtgtccatcttgatcaacaaccatctgtgttgtatcaacgccggtctttctcatataggactctatgaatcttccatgctggtcatccggaattttgccgatgaagcccgcttttaagccaagcttcgcgctgccgatcgcgatattcgcaggtgaaccgccgacatatttcgaaaatgtcatcgtttcttccattgggcggttgtattcgactgcgttcagatcaatacatgcccggccgatggcaacaatatcaaaagccttctcttcattgaatgtatacttcatcgtaaacagccactcctcacttgttagcgttctaaaatccattcatgcgccgggtcgttataaaacttccattttcgcgtcggccctgccatgacatttaaatagtaggatgtgtatccgtccggaacgcctaccgggtggtatcccgcaggaacgatgacaacgttttcatttcccacagtcattgtctcgtcaatagaacggtcatctgtgtatacgcgctgaaacacaaagccctgtcccgggtctaactcatggtagtacgtttcttctaagaaagattcttccggcaagttgtcttgatcatgtttgtgaggcgggtagctggaccagttgccgctgtctgtatagacttcaactactaatagactgttagctgaagggtctgaatccggaagaatgttatgaacagtacgtttgtttgaaaattgcccgcgatgctcaattccgttgtcttccgctttgatcagctttgtcggaagctgcttttccgatggagaatagcaaagcgccactcttgcgtcgctgactgctgtgatctcaaatgcacggtcatttgatatatagacgctgtctgtcggttttcgttcaaatacgctttcacgcgtgccgatattctcaaaagtcgactcatgatctgtcactgtaatttttcccgttaccgccacaatacagatttcttgttttttcaattcttctgtatagcttgaacctgatgcaagatctaacactttaaactctacataagtgagatcagagttggatgtcgttacttcgtgcacgagtttgaccccattagacacttcatgcgactgcggcttacgcaacaaataactcatagagaagccctcctctttctattggcagaatgagtccgaacagcgcacatggacgccgttcggctgttcgtcgtttagttgaaatcaggtgccggatatcttgccgtcaccacttttttacgtgtatagaagtcgacgctgtcttttccgttcgcatgcagcgttccaaagaatgaagatttccagcctgagaatgggaagaacgccattggagccggcacaccaaggttgatgcctagcattcccgcatcaatgttttcacggaagtagcggattgcgtttgagttggatgtgaacaagcaggcgccgttcgcaaactcagacttattggcgatttcaatcgcttctttcaggtttttcacacggatgacagataagaccggagcgaaaatttcatctttccagatcgtcatttctgttgtgacattgtcaaagatcgtcgggccgacaaagtagccgtcgtcagacacattttcacgtccgtcacatacgagtctggcaccttcttcaagacctttttcgatatagctgagcgtgcgcttcttgttgtcttcgcgaatcaccggtcctaagaacacgccgtcatcaaggccgttaccgattttaatgtccgccactttttcctgcagcttcgccataaattcatcggcgattccttcttcaactgtcacaaccgcacaagccatgcagcgttcaccggcagaaccgaaggcagctccaacgatgtttgtaaccgtgtcttcaagattcgcatcgttcaagacaatcgtatggtttttcgcgccagtcagagattgaacgcgttttaagttttcgcttccttttttgtagacgtattcgcctactggcttggagcctacaaatgaaatcgctttaatttcgggatgctcgaggatgccgttcacaacgtcatgcgcaccgtatacgacgttgaacacccctttcggaaggcccgctttttcaaaaagctcaaccaatttctctgttaacagcggagtccgctcagatggctttaaaataaatgtgttgccgagcgcgatcgccatcgggaacatccagcaaggaaccatcatcgggaagttgaatggcgcgattccgccgacaactccgattgggtaacggtagttcgccgcttcaacgtccgttgcgatggaagcaagtgagtcacccatcatcagggaaggtgctccagcggcgaactctacgttttcaatcccgcgtcccacttcacctaaagcttctttcgtgttttttccgttttcaatggtaattagatgagcaagttcttctttatgctgagacagcagctgctggaagttaaatagaattctggcgcggcgaggaaccgccacctttgaccatgttttaaatgcttcagccgctgtttgcgctgcgtaatcaatatcctcttttgtagaaatcggcacttggcatagcacttctttcgtcgccggattgacgacatcttcatattgatctgttttgctttcaacccattcaccgttgatgtagttttttaattttctgatttctgccattcttattgcctccttcattagtaaacacatacacttgtatggatggttccggatagattcatatcaatatccacttttcagcaagccaagaattaaacgctttcaaaaacaccaaaaaaataaatggcggatgcatatttacatacaagcaaccatttcatgcacaacaggttactttttggtcatttcttggttatattctaatcgcataatacccataagtcaatcataaacactacattttttcattatttttattatattaatcttttaatcaagtaagagaagtaagagaaggccgtccaatcttgcaaaagatatacaccgatgttatcattttttaagcaactattgattaacttttggtttttattatatatttatgttacgtaaagattcaagaaggagttttttatatgaaactgatgcggattcaggaaatggaggagtacattttatcgcatggcactgtttccttagatgagctgtgccaggtgttcaatgtctccaaaaacacagtcagacgtgatatcaacaagctaacagaaaagggtgcgattgaaaaagtatacggcggcgtaacatctattgaaaaaaccgcattagttccttttgaaaatcgcaccattcagcaccaggatgaaaaaacaaaaatcgcccattatgcttcccgatttattgaagatcacgatttggtcttcattgattcaggaacgacgacaaagtctattcttgatacgcttgatccagccaaaaatgtcaccatcttaaccaacagtttagacattatcaatgcggcgtcagctttgaagaatatcaacttaatcattatcggaaacaactataagagaaaaacccgctcctttgtcggcatggacgacccggctatgcttgataagtacaatatcaacaaagcctttatgtccgctaccggaacgacgctgactcacggattgaccaattcggatctgctggagtatgaaattaaaaagaggatttcagaaaaagcaaaagaagtgtatctattggctgaccattctaaattcggaaaatcaacgcttctgacgtatgcaccgtttgacaggctgcattgcattgtgacctctcagccattagacgacgagtacacgcagtactgcaatgagcatcaaatcggcattcatctggcctaacgtttacaatagtgttgagagtctatcatccattttattctaggaggcagatcatgaaaaaagcgaagctcggaaaatcagacttgcaggtattccctatcggattaggaacaaatgctgtcggaggacataacctctacccgaacctaaatgaagaaaccggaaaagaattggtgcgcgaggcgatccgtaatggcgtgacaatgttagacaccgcttatatttacgggatcggccgttccgaagaattaattggtgaagtgctgcgtgaattcaaccgtgaagatgttgtcatcgctacaaaagccgctcacagaaaacaaggcaatgactttgtctttgataattcaccagaatttcttaaaaaatcagttgatgaaagcctgaagcgcttgaataccgattatatcgatttgttctacattcacttccctgacgaacatacgcctaaggatgaagccgttaacgcgctgaatgagatgaagaaagccggaaaaatccgctccatcggtgtatccaacttctctttagagcaattgaaagaagcaaacaaagacggtttggtagatgtattgcaaggcgaatacaacctgttaaaccgtgaagcggaaaaaacattcttcccgtatacgaaggagcataatatttcatttatcccttacttcccgctcgtatcaggtttattggcaggaaagtatacagaagatacaacgttcccagaaggcgacctgcgaaacgaacaggaacacttcaagggcgagcgtttcaaagaaaatatcagaaaggtcaacaagcttgcgccgattgccgaaaaacacaacgtggatatccctcacatcgtattggcctggtatttagcaagaccggaaattgatattttaatcccgggagcaaaacgtgccgatcagctgattgataacatcaaaacagccgacgtgacgctttctcaagaggatatttcatttattgataagctgttcgcataagaagaaaacagccttctccattggagaaggctgtttttttgtgcgataaattcctaaataactgattttgaagcaaaaccttacaaaatgagccataaatccgataaaataaaggtagtttatctcagaaagaaagtgattgagaaagcaaaagtatgaaacgttcatatcatctagctcatatgaaataaagctgacccagcttcttttatttgctggtcagaatagcggaccatttcgatggtctatggaggaaacagaatgaaacttaaatatgtaaaagccttagttgcagtaaccgttgctttaggtgtactgctgccatcaacgatttctcatgcaaagagctttagcggccgctcatcatctagttacagcagccgaagttcaagctcgtcatacagcggaagctataaatcaagcccgaaatcaagctacagctcaggatcaagctcttctagcaaaaaatccaagacgcctgacgattcatcatcatcgatttcgcttaaaaagaagccttcggaaaaggcaagctcatcaagctctaaaaaatcgtcaggcaccttttccggcgctacatcaaaagtaaccggaaagacatacagcggaaaaacgtctaaagcctatgttggcggacgatatgtttcagtcaatcattactatcacgcaggtttcgcgccatcaggatggtttggatattatagcggatttacaatgggtatgttcatgatcagcatgatgcacccatggggttacacctatcatccagtcggaggcccaggttatgtttcttatggcgcttcacccattgcctggatcgttgatatcatcgctttgattattattttaatcattgtcatcgcactgattcgcgcatttaaagcaccgaagacgtacagaaggagattttaggcaatgagattaatattaaatgagcaagaaattgtagacggaatttgcgtgtatatttccaatgaagaagatatctaccctgaagacgttgaagtaaaggagctatcttataacaagcgtacagggttcttcgctgaagctacatttggcctgcaccacaagcagcttatgtcagatgacatttcagaaggcattattcagttcttagaggaataccacaacttcaatccggacgttaccgtcgttgaattgcaatttgataagaaaaaaggcttctccgccttggttttcgtcaacgaagcagaagaataaaaatgtcttaatcaaaaccttactccgcgcgggtaaggtttttttaatggtttctctgagcataaagttatttcgtttttcctaaactcagcggatctgtgatcatctcttttggctttaacgtttccgtttgttcaaaacaaatgtttcaaatgagataggaaatgggtactaatctattaactttgttatacattttagatactcattggctcaacaactgaggaggagacatttgtgaagaaagacacaaggaaatatatgatctactttttcggcgctttagggggactgctatatggttacgatacaggtgttatctccggagcactcctgtttatcaataacgatattcctttaacgacattgacagaaggattggttgtcagcatgctgctccttggcgcgattttcggttcggccttgagcggcacatgctcagaccgctggggcaggagaaaggttgtatttgtcctttccatcatttttattatcggtgcgctcgcttgcgcattttctcaaacaatcggcatgctgattgcatctagggtgatactcgggttggccgtcggcggttcaacggcacttgtgcccgtgtatctttccgaaatggcaccgacgaaaattcgcgggacactcggcacaatgaacaacttaatgattgtcaccgggattttgctcgcctatatcgttaactacctgttcacaccgtttgaagcgtggcgctggatggtcggtctggctgcagtgcctgccgtgcttctattaatcggcatcgcgttcatgccggaatcgccaagatggctcgtgaagcgcggccgtgaagaagaagcgagacgcatcatgaacatcactcatgatcccaaagacatcgaaatggaattggcagagatgaagcaaggggaagcggagaaaaaagaaacgacactcggcgtgctgaaagccaagtggattcgccctatgcttctgattggcgtcggtcttgccattttccagcaggcggtcggcattaacacggtcatctactacgcgccaaccatttttacgaaggccggtcttggcacatcagcttcggcgctcggcacaatgggaatcggcatcctcaacgtcatcatgtgtatcactgccatgatcttaattgaccgtgtcggccgcaaaaaacttctgatctggggaagtgtcggcatcacactgagccttgctgctttatcaggcgtgctcctaacgctcggactttccgcatcaacagcgtggatgacagtagtctttctaggtgtctatatcgtcttttaccaggcgacatggggtccggtagtgtgggtgctcatgcctgagctcttcccgtccaaagcacgcggagccgcgacagggttcacgactttggtgttatcggcggctaacctgatcgtgtcgcttgtctttccgctgatgctaagcgcgatgggcatcgcatgggtctttatggttttctcagtcatttgtcttctctcatttttcttcgcgttctacatggtgccggaaaccaaagggaaaagcttggaagaaattgaagcaagcctgaaaaaacggtttaaaaagaagaaaagcacccaaaaccaagtgctgaatgagcgtacattataaaaaaaggaatcgtctccttatgggacgattcctttttctgtttacaccatgaccttgcaaatattgttcgtaaattccacagggtcctgaatcggcaggccttcgatgagaagcgcctgattgtacagaaggtttgtgtacaggctcagcttctctttatcttgttcaaacgcgtcctgcagcgtttggaatacctcgtgatttgggttgatttccagcactttttccgccttcacattttggctgtcaggcatcgcgtttaagattttttccatctcaattgtcacttcgccgtcagcagcaaggcagactggatgtgatttaagccgttttgagattctgacgtttttcactttgtctgacagaatgtttttcatttcctcaaacagatccttatacttgctttcctcttcctcggactgcttttgatcctcatccgtgtctatgccaaggtctccgcttgatacggacttgaattctttttcctgataagaagccagcattttaattgcaaactcatcgatgtcctcagtaaagtagaggatttcatagcctttgtccgccaccatttccgtttgcggcagtttctcaatgcggtcgtaagaatcaccggtcgcgtaataaatgaatttctgctcctctggcattctggaaacatactcgtctaagctgaccagttttttctcttttgaagagtagaataataggagatccttcaattgatccttattcgcgccaaaatcattgtacacgccgaatttcagctgtctgccgaacgacttgtagaacgtctcgtatttctcgcggtcttttttcaacaggctttgcagctcgcttttgattttcttgctgatgtttttcgcgatcagcttcagctggcggtcatgctgcagcatttctctggaaatattcagcgatagatcctcagaatcgaccatgcccttcacaaagctgaagtggtccggtagcaggtctgcgcacttattcatgatcagcacgccattggaatacagctccaagcctttctcatattccttggaatagtagtcaaacggcatgttttcagggacgaatagaatcgcgttgtagcgaacggctccatccacactgatatgaacgtgtgtcagcggtttatcaaacccgtaatgcttttcagcatagaatttttcgtaatcctcatctgtcagctcgcttttgttttttctccagatcggcaccatgctgttgaccgtctgctcttcctgcacctcttcaaattcattttcgctgccttccttcggcttattaatggttgtatccattttgatcgggtagcgaatgaagtcggagtacttcttgatgatcgcttttaaacgatattcctctaaaaactcgtcatagctgtcatcttctgtgttctctttgattttcaggataatgtctgtaccgacagaatccttttcacacggctcaatcgtatagccgtctgcacccgcagactcccatttataagcctcttcgctgccaagcgctttactgatgactgtcacgacatcggcaaccataaatgccgcgtaaaaaccgacaccgaactgcccgataatgtcatgtccgtctttcagctcgttttcctttttaaacgcgagggaaccgctttttgcaattgttccaagatgctgttcaagctcatcctttgtcattccgatccccgtatcagagatggttaatgttctcgcatctttgtcagctgcgacctttatgtagtaactgtctttatcaaacgtaagcgcatcgtccgtaagcgctttgtaatagattttgtcaatcgcatcactcgaattggagattaactcgcgcaggaaaatttctttttgggtataaatggagttaatcatcatatccagcaagcgtttagactctgctttaaactcttttttcgccactcttgatcgctcctttaccattatgtaaacccttttcagcatctatttatcacataagatgacaattgtcaatcaggttgatagatgcatatatatgtaaatttaacattagttggatttgttttcactctttttctcactcattctcataaaaaagagaggcttcatcatcctctctttttttctgtgtcattccagcggccaaactcccgcttcatccatatatgcaccgggtagaaaaacaaaccgaacggtatcaaaaacaatagattatgccatgaagcattcagaaatgcgcttgcagtcactggaaacgtaatctcttgcaataaaaaagagatgacagtcagcacaacaaatgcagatggaatggtcacgatgcaataaaacttgagctccttcttatgctgtaccttcaaacttagaaacctcccaacaatttctaattcatcttaacatatgctggcctttcttttctcgcatgtttatcactgcacatagcgggaagacaaatagaaaaaggaggtctcgtatcatgggaagacttgaaaacaaaacagcagtgatcacaggcgccgcgacaggcattgggcaagcgacggcagaggtttttgccaatgaaggcgcgcgtgtgatcatcggagatatcaataaagatcaaatggaagaaacagttgacgcaatcagaaaaaacggaggacaggccgaatcctttcacctcgatgtgtcagatgaaaacagtgtgaaagcatttgctgatcaaatcaaggatgcatgcggaacgattgatattctgtttaataatgccggcgttgatcaggaaggcggaaaggtggacgaatatccggttgacctgtttgaccgcattatcgccgtcgacctgcgcggcacattcctttgcagcaaatatttgattccgctcatgctcgaaaatggaggctccatcatcaacacctcctccatgtcaggccgtgccgcggaccttgaccgctccggctacaacgcagcaaaaggcggcatcaccaacctgacaaaagcgatggcgatcgactacgcacggaacggcatccgcgtcaattccatttcaccgggtacgatcgaaaccccgctgattgacaaattagcaggcaccaaagaacaggaaatgggcgagaaattccgcgaagccaacaaatgggtcacgccgctcggccgcctcggccagccgaaggaaatggcgacagtggccctgttcctcgcgtcagacgacagctcatacgtcacaggagaggacatcaccgcagacggcggcatcatggcatacacatggccagggaaaatgctgattgatgagaaatggaagaaagaaacgaaataagagaggggatgtccctctctttttgtctttcaaagcaatacaaccttatactttttcacatccaaaaactgcaaaaattccctcgccagcacttcaggcggatgcgcctttccttcatccagccgatacaaaagcaacccgataatcattgcggatacataatgggcataaagctttttctctgcgtgaatatcagtttgctgatgcagataaaacgattccagcgctttgaacatatcaggtatcacatgaggaacaccccattcccgattgagaaaatggacaatgggcatatttgacaaagcagaaagcagactggcgagcgccttctccgcttcctttaaggaaaattcattcgggctggaggcaatcgtcaggtgatcaatgatctccgcacatgatcgctgtatcatggttcggagcaattcctccttattggcatagtgatcataaaaggttgcacggcggatattgcttttccgggtaatatccgaaattgtgatggctgcgtagtcttttttctccgccagcacgtccagaaatgccttctggagcgcctctctcgttcgaaccacacgcctgtcgatttgcttgtccttctctcgctctcctggcacagcttgtccaaacagccaataaaatctcttttgagaaacaagctcccataccttttggctgatagcttccggagtcgcggccgcatcctcattcagccaatacaggataatcgcgtacgtgtacaaggcccggtaatgtccgtaaatttcccgttcgatcggcgtcaaattcacatggaccggagtcagcagcacatcctgctgaaacacatccttaaaaaaacgatggaaatgccctctgttcatcatcacagaaaaaaaggatcgatgctcatgaacaaaggacagcgtcggatgcaccgtttgccgttttttgttcaaatggagggtatccatatgactgaaggcgccaaaaagcgctttgcccagcccttccttcttgtcttcgattaaatcctcaatgattgaaaacttatcctcataataaaggtagagcgatccgcggctcactttggccttttcagcgatttctttcattgtgatgtgttgaatatctctttcttccaataaagccagcagcgcctctttcacttgagcttcggcagattccggcacaaaagacacccccaatcattagacagatcttcgatatatgtacggtaacgtatagatggttcaccgttgtctttcttacagaaaaggtaccaccttataataggtccgagaaaagaagaaagcaaatgagggggattttacaatggaacagcaagtaaaggacgacatccagcgtgtctttcagcttcagaaaaaacagcaaaaagccttgcgcgcttcaacagcggaacagcggagagaaaagcttcaacgctttttagattccgtcatcgcccatgaagaagaaatcatcgaagcgatccgcaaagacgtccgcaaaccatatcacgaagtcaaaaaagcggaaatcgaaggaacaaaaaaagcgattagagataatatgaataacctggaacaatggatggcgcctaaagaagtcggttcatcgttaagccctgacgcaaacggaattcttatgtacgagcctaaaggcgtcacactcatcctcggcccgtggaactatccgtttatgctgacgatggcgccgcttgccgcttctctcgcagccggaaacagcgcgattgtgaagctgtccgatttcacgatgaacacgagcaacattgccgctaaagtgataagagacgcttttgatgaaaaagaagtcgcgatttttgaaggagaggttgaggtggcaaccgaactacttgatcagccgttcgaccatattttcttcactggaagcacaaatgtcgggaaaatcgtcatgacagcggctgccaaacacttggcatctgtcacacttgagcttggcggcaagagcccgacgattattgacagtgaatacgatctgatggacgcagcgaaaaagatcgccgtcgggaaattcgcaaacgccggccaaacctgcatcgcacctgattacctgttcattaaaaaagacgttcaggacaggttcgcggggattttacaaacagtcgtcaacgctggatttatggaggatgatcataccccagaccgcagcaaatttacgcagatcgtcaatgaccgcaacttcaaccgcgtcaaagatctgttcgacgatgccatcgaaaaaggggcggaagtggtgttcggcggcgtatttgatgccagcgaccgcacgatctcgccaaccgttttgaaaaacgtcacgcctgatatgaaaatcatgcaggaggaaatcttcgcaccgattctgccaatgatgaactatgaagacatcgacgaggtcatcgattacgtaaatgaccgcgataaaccgcttgcactttatgtgttcagcaaaaaccaagacctgattgacaacgtccttcagcacacgacatcaggaaatgcggccatcaatgatgtcgtcgtccatttcagtgacgtcaacctgccattcggcggcgtcaacacaagcggaatcggctcctatcatggggtatacggattcaaagagttttctcatgagaagggtgtatttattcaagcctctaaataatcataatgaagagaatctgcatcatcttgcaggttctttttttatctttatatcacctaaataaagagattaaaagtgataaaatacaattttcaaacgagacaaaattcctctagtctatctcattgaaaccctgcagcccctaacgtataatacccagaaaactttaaaggagtaaaatgatacatggaaaaaccagcaggattttggattcgggcagccgcctctattattgatgtatttattatagctatattctctttcattatgattttattaacaccttcattgtgttgccactcattgatgcagcaggtacacacatgtcagaagcccgatatgagtttttcatgttgatcattggcacaatccctgttttggccatcatatttattttcgctattctttactatagcttgctgacttcctcaaacatgcaagcaacattgggaaaaaaactcatgggcatcatcgttgtcaatcagtatagcgagcgtatttctttttggcacagcttcggccgtttcttcgcttacacattatttaagatcttatatatcggttttatcatggcggcctttccctctaaactggcattacataattatatttgcgggacaaaggttgtctataaaaataaatatcttgattgatcaaaaaaacaggctgccgagttaacctcgccagcctgttttactatttcccaaaagccatcagcttcgtataacttccaatataaagcgttccgtcctcagcgagctgaggagatgacactacgttgctgtcggtttgatatttccataattcattgccgtttgcgtctgccgcataaaccttcatatcatctgacccgaaataaaccgttcccttcgcgtcaatcagcggcgccgttctgacagggccgtctgtgtagaatgaccagttcatatccccgtttttgctgatggaaaacagctcgccgcttcctgagccgatgtagatattgccattatgatcaatcgcaggagatgagctggagaacccgtttagcgggaatgtccatttcaaactgcctgttgatgtataagcatacagctgtccatcttggttgccggcataaatgtttccgtccttatcaatcaccggatatcctttaaacgcatttgacgtcgttctggaccatttcacctgtccggttccggagttgatcgcataaaacacgtaattatatgtgccgacatacacggtgccgtttttggcaagcaccggcacagagctgacgacaccatttgttttcaacttccagcgctctgtccaggttgattttgacgtcggtttgatcgcgtgaacataattatcaagtgttgagaaatacaacgtcccgtctgaaccgatcaccgtttcagagcttggcccgccgcttaacggaaccgttgttaaaatttctcccgtttctttgtcaataaaataaatctttttgtcataggatgccaaatagataacgccgttggtcccaagtacaggagattgcgtatatgtttttccaagattgcccgtcacccatttgactgagccgtctggattaaaggctttcatttccccgtctctggaatgaagatatactgtgccgtctccgtcaatcacagcccccgctccattttgcggagtcgttctgatgtcgttttgccatttcagcgtcccatctgtatttccggcgaaccggctttcgcgtgaccagttaaacatggcaggcgccatcgcttgtacatcatatcttcctggcaaaaagccagatgctccattattttgagaaaacaccgtttccgccgcataagcagctgtcggctgaagcactttggcagcgggcacatcagaaacagcgccggccgaaacagccgccgccaccgcagctcccgcaatcaaagctttcatacgaaatgacttgaccatcattgagacccccattatatgtaacttctaatttgtgaccatcataacatattcatccattttataaatctatttcacaaaaacatcacaaactagaaaactatgtaagagtattcacggacgttttttcagcacccggccgaaatgcagccacaaaccaaatgacgttgacagcagccgcagcgagactaattccgaaaacaaagatcacctcagaaagcagatggtcactaaagaaactaaacatcaagataaaaccggccgaagacaaatgaatcaaaagcccgaagccgcaaagcaccgccatgacatacctcattgcatcgactccgagcatataaacgagaaatggaatgaaatacaatacaaggatcataccgacagctgaccacatgccagctgaattaaactgattggccgccgctcccgttccggccagcggcgtaagtgaagccgccactatcacggcgcaaaaaagaaacgcagaaatggttgtcatgatcgccacgctattttttttagacatcaaactcctcctttaatagaaatattaacctttttcattataagtaagttgaatgttatattcattatattttttaaaaaaatccagatcgtacaaaaatgatatgattctttctagtatatttatatagtaaaaaacaaaggataaaagactcatttttctgtaatatcaggattttatcaccataccatattgcatgtacttgtttttcaaagtatactattccagattaattcagaggagagagaaaaatacatggaaaaaccagcaggattttggattcgttttttagcttattttattgatggcattattgtatctgttcctagttatattattctatttgtgatcaattctgtttttgtagctggggctgtggcaacaaacccttacatgacggaagaagagtatttagtgaaatacatgacgcttgcatttttgcctactatgctgatcatgatcgtcatcagtgtgttatattacgggctgctcacagcttctaaaatgcaaggcacacttggcaaaaaaattcttggcctgaaagtggtcaatgaacaaggtgaacgggtttctgtcggacagggaattggccgttactttgcctatatcttatctggaatcatcttttatatcgggtttatcatgatcgcctttggagagaaaaaaggcctgcatgacatcatttgcaaaacacgtgtcgtgtataaataatagaaaaaagtctagacgccaataggcatctagacttttgttttctttacaataggctgccacgacagatacgtagcgcttctccacagccactcaaacggccccatccgaaagacacgaagccaaaggtggctgaagaccatttgaacggcacaaaccgtaattgtaatgagcacaccggcagcagggtacacttttccatacaggcccaagccgtaatgataaaaaatccaagtacacacaatagactgcatcaaataattggtaaatgccatcctcccaacagcggagaatgattgcagcactgttctcactcttgttttatgataaagatagacaaccgttgtaacatagaaaaacatgaggaaaggcgcgccaatcagcagaaatagttccttttccgttacactgtacagcacatgggcgccgatgccgatgacaagcccagccatccataatcgttttaatcctttgcgatgcttttccggttcatgcaaataccgtgattttgctgccgcagctcccagcaaaaacatgctgaaataaggaatggatgcaaagaagaagttgagcggattatacgtaagcatgccattcgaagacatataaacaagacggtcatggatccgctgttctgcaatgtccttcaggctgccgcttccataaacatgaatcgcttgtgttgcctgctgtgttaccgcttgtacccattcctgtccgtttgattgatcaaaacttgtcaacatgaacggaatggaaaacagaagatacaaagagaccgcccatatcagcagtgttttcggctttgcttttcgaaacaagagcaggacaaaaccgagcaaggcatattctgttaaaatatccccgtcccatatcaaaaaggcatgaatcgttccaaacaagagaagcgccattaaccttctcacatataacggaacaaaccgtttccctttgttttctgctctctccatcatgacaaccatgccaaatccaaataaaaaggaaaacaataaaatacattttgtttgaatgaagaatttcagtatgtctgcggcggcaaaatcagcttcagaccacttatccatgaaaaaattctcttttccaagcatagacaaatacatatccggataactgaaatgtgccagattgacaaataagatgccgaaaatcgccattcctctcagcacatcaagcacaccgatccgctcatttgttaaagtcggctgtaatgaagacatagccatcacgctccttttttctgtaccttaagggtatgaaaaaatgaagcgcggaaacatcgatttaggtgtcaggccggcatgaaaaccttacaatcttgtcatctttatggtttcatcacctttaaatctaatgcttcgatattctgcaaaacgcgatcaaaacgcaaagcctgaggctcacatgggaagatgtggccttcatacgggtcgcctaacgtccggaaaaacggttcaaataaaccaggaaccaatacgcccaccatctttgtatagtaagaatcaaggcgataggagtgaacggtatttgcagggacatgcaggaaatctcccggattcagctgaatttcctggccatctgcccacatcgtcatctggccttcaaggcaataaaatgtttctgtatgatgttcatggtagtgatcaacgattcggtcacctttagggccttcagaggatacgacgataaactggccatctgtatttttttgtgcagccacaatgcggtgaagctgatctccagtcaacaggcgatctccttctccagattcaagaacgtatggaaccgctccatctggcagctctgtaagttccgctaatttggccgaacatgcaggcttttcttcatctagaaatacaatgtccgctacagcggctgcttctgcaaatcgctcgtttgagacttcttcgcttgcgtacggcggatgttcagcgtgatcatacggattcccaataacggaatacaagtgcgctacgtttcctttcatcgtgtaagataccagtcttgttctgtggctctgcatccggtagctgtgcggtgttcccgccggaatgttggcataatcacctgatattaataaatagcgttcaccatcaagtgtcagttccagtttcccgtccaaaacgagaattccttcatgtgtgtccttgtggacgtgaagcggaaaggcatctccttttcccccggaaagaagcacgatctcaaacaaatcacctgtgctcctcccattcgcaatcaccgtggcaacctgtctgccgaacagatagcgctcgccttctccgctccggagcaaataaggcattttttctttgggcaatgaatgtgtacataatgttttcatattatcgcttcctccaatttagaccagtctatatactataactttctgactagaccgttctatataattgtaggagaaaggataacaaaatgctaccctttttttctcaccagcactggtatttgttcggcaatgagaagaagaggcgttttgtctttattcgttaacgaaagcatgatgccgccctcaatcatcgaattaatcagcgttccaagctgatttgcttcttcttctgcaaatccgttttccattaattttctggcaaaaaccgcttcccagcttttaaacaccttcatgcaaaccgtccgtagcggttcactgattaacgctgtctcactcgccagcaaaccgactggaatacctttaatgctttctgtgttgtcaaattggctggctgtttttttgataaaaagctgaatcgcttcaataggatcagaggattcatccatgctttgctgtatcagatgttcaacgatcttacctgtatatgtaaccgcttcaattgctaattcttctttgccattcggaaaaaagtgataaagcgatcccttaggagcaccgctttcttttacaatctggttcaaacctgtcgcgtgatatccttgcagctggaacagacgtgacgccgtgtgaaggattttttcacgtgaatctcctctgctagtcattaaaacattccctcctaggtatggtagagcgacttatataatataaaaaagaaccctgtgattgtcaaaaggggtaagacccttccggatggggtaatgtacaaaaacagcgtctaggagggatctctcaatgacaatcgatcattcagtcacgaatacagagcagcttgaacaacagaaccccggcatgaaaacgaagatcaaactgaaaaaactcaaggatcaggtgatcgtcattaccggcgcttcaagcggtatcggacttgtcacggcgagaatggcagctgaaaaaggcgcaaaggtcgtggcagcagcgcgaaatgaagacgcgctgaaggagctcactgatgaacttaaggaaaaagggcacgacgccatatgggtaaaggcggatgtcggaaaagaagcggacgtcaaccgcatcgcagaaaccgcgatcagcacattcggccgctttgacacatgggtcaacaatgcggccgtctcgactttcggacatgccatggacgtcaccgttgaagacatgaagcgcatgttcgacacaaatttctggggacctgtttacggaacaagagcggctgtcaaacactacactggcagaggtgtgccgggcgcactcattaatgtaggaagcctgttcggagacaggggaacagtcattcaatccacatatgcgtctgccaaatttgcgcttcacggctggacggaaagcatccgaatggagcttgaaaaggaacaggcgcccgtctcggtaacgctcatccacccgggcagaattgacacgccttataacgagcatgcgcacagctacctcgacaaacagccggctcattaccgctccatgatctatccgccggaagcagtcgccgaagctatcctgtttgccgccgaaaaccctaagcgcgacatgtacatcggctcacaggccaaagccatcgccatgctgggcgcgcttttccctcgtctgaccgacagactgatggaaaaaatcatgtatcacagccagcatgccgaaagaccgtccaaaccgcgagaagaaagcgctctttatgatgcgggctgcggtatgcatgacagaggcacaaataaaggatggatgaggtcaagaagctactacacaaaagcgacgaagcgccccattgtatcggcggctgttgttgccggactagtggcttgggctgccgccaaacgatgcagataatctctgaccatgatagaaaaacccatgctgttccagcgaaccatgggtttttcagctgttaatcgataaaagccttgttcatacgctgcagcagctcgccaaacatctctttttcctgtgttgaccattctttcagcatctgttcataacgttcaaggcgcttttgctgatcggcttttaatagttgtttgccgagttttgtaatggtaaacaggctgactctcccatcagatgggtctgagaaacgatagatgagctcctttgcctctaatgcagctgcttgtcttgaaagagtagaaatatcaagcttaaacgattctgccaattccttaacacgagcaggcccaaactcatccaattgtctcagtaataagtacgaagatctctccaaattccctgttcttttctccgattgatccagataaacagctctcctgataaaagtcgtcagctcatattcaattaattcaactggattttgattttgcaatcgctctcgctccctattccaatctccggcattgacaacatcatatatacttgtataatacaaatgtacattaactgaataaatacaagtcgttatatgactaaatcaattattatacttgtatagtacaatcatataaaaagaaagtaaagcgattcctcagaaccatcctagaagcaagcaccagaaaggaggaagctgttctgattggagagcagcacttgatgtgaaagtcatacgaattattttgcaagtgttgatattatatgtattttttatgatcggggaagccattcagcatctgtttcatttacccgtgtcaggaagcatcgttggattggtattgcttctgatctgcttgggcctccgtattgttcccgtctccatcattgaagacggagcagggtttttattatccttccttccattgttgttcatcccggcaatgacaggagtgataaactatccgtctctcatttcattcaatggcctgatgctgctgattacagtcgttctgagcaccatcgtcacgatcattgcggctggattcgccagccagctattagagaaaaaagcaaaaaaacgggaggagaaagagaaatgcagcaagcatgtatcgcgatcattataattcttttaacagttgccgcttatttagcgatggtcaaactctataagcgattcccgcttccatttcttatccctgttctgacaacgaccattttgattgtagcggctttgatgatgtttcatgtttcctatgaaggctatatgatcggggggaaatggatcaattctttgcttgggccggctgtcgtggcactggcctatccgctttataaacaatggcatatcattgtcaaacattgtgttcccattttaggcggcgtcctggtcggattatgcatgggaatgatcagcgggctgatcttcgcagaagcattcgggattgatcatgatctcttattatccattctgccaaagtcgatcacaacccctgtcgctattcagatcgccgccggtcttggcggcgtcccttccatgacagtcgtatttgtcatgattgcgggcttttcaggcgtcatcctcgggccgcttttcctaaaatggcttcgcatacgcagttccctaggacaaggcattgcattaggcagcgcctcccatgcactaggcacctccaaagcattggaatatggagaactggccgtctccatgagttccgtctccatgacgctttgtgcggtgctcggctcattcttcggcccgctcgtcgtctggctgtttcatatttaacaaagaaagactgccccgggggagggcagtctttttcgtttaagaagcaaaaaaatcaatcagcggctgaaagtccttagataaatcaacgtcattcggttctgcttgaagcaggcggtcaatcatacgctccagctcctcaacatcattcttatccgtatattcaatgaagtttaagctttcaagccaatcccgatatgaatgtttggctttgccatagctgtttccaaagacaaggcaaggtgttttggtgataatcgagaaaatcatcgcgtgaaggcggtcggtaatcaccaatttactggagccgatgcggtccagcatctccataaaatgcttttcacgatcagcgtaatcgatggtgtctaccgtatccagcaccgtatcggtacgctctgtgtaagttgttttttctgcccattgcttcatctgtgaaataaaatcttcgtcagtcactttctccttatccgctcttaaaataaagagaacgccgtcccgctcgagctctcgcggcacaatatccaaggaaagcaccatgtccggtgtaaagatcacattggagttgaaggtctctttcacaacatccagtgtttgcgtctcacgcgcagcaatcgttaagtttgtattttgatggtacgcatcctgtgtttttttcttttccttctgtccttcctctgtatcctcaaaataaacggattgtggcagagaaattgatttgtagtctttaaacgccgaaaagacctttcttctgtcttcctcaatatcgagataaaggtttcctaagttccctccgcctgtaaagcagacaatatcgtcttcacgaatgatctccttcaccagttcaatgccctcatccgtcgcataatccataatctcaatgtattcataatacggaaaatgatttttgataaatttctcttccgcatacgcaatcgcttggtctccaatgtttgtgtaactaggggaaccaaacaaaaatacttttcgtttatcatttaacagagcttccggctccacatttggcgcaatgccttttactagttttttgcctttgattttttgtacagtcatatctgcgtcctccttctgggatgaattcctcattgtgtgttaactgtctctacccaaaaagaaggatggctatgcattggcatgtgcatcggctatatcagaaacatcgttttcgccaatttgatagacgctgcaatgtcccgcgccgttctttccatatattccgcggcatgttcaaacgcatcttctagcggcacggctccggggacgatgctgaaaagcgcatcgattccgtgttgatagacggcatcactgtcacgtgatactgatcccgcaataccgatgacaggcacatcatatgatttagccgccttggctacgccgatcggcgtttttccatgaaccgtttggctgtcgatccgtccctcgccggtaatcacaagatctgcatcctgaacgatactttcaaaatcaaccgcttcaaggacaatatcaatgcctcttttcaggtcagcctgaagataagtcagcaggctccatccaagaccgcccgctgcaccggcgccctctgtatctcggaaggttgatccgagctctttttctgtcatatcagcgaaatggcttacgttctggtctagtacatccagcatgtcggccgtcgcgcctttttgcggcccgaaaacagccgtagcgccctttggtcctgttaacggattgtccacgtcacaggcaacttccagtttgacattccgcaatctggaatcaagcccgccaacatctattgatgcaagctgagataacgcgccgcccccgggccaatctcgcggcctgagttatcaagaagccttccgcccaatgcctgaatcatcccggctcccccgtcgttcgtggcgcttccgccgattccgatgatcaatcgctccgctcccgcatcaagagctgctccgattaattctcccgttccccttgttgtagtgatgagcggatttcgcttatctacaggcaccagatgcagccctgaagcagcagccatttcaatcacagctgttctcccatctcccatcatgccaaagaaagctctcaccggttcccccagcggccctgtgacaacttgctctatgatccttccattggtcgcatcgaccagagattgaacggttccctcgccgccatccgccaccggcaattttctgtaatcagcacccggaaagaccgatttgaaacctctttctatcgcttcggctgcctccagagctgataagctttccttaaaagaatcaggtgcaatgatgattttcatccaaatcgcctctttcaaaacatgattcacttacgctagttatctccaatgtaccatattccatttagaaataaataccataatgattgggaaaaattttattaaaaattagaaatgaaagtgtttgcataaaagaaatattcacgttatcatacttgtatacaagtatacttcttgagtgaggaaggtgagtgtatgctagactccaaagacctgttgtatcccgcaaaatggctctcaaaagcgtcaaccggagttcgtgtcgcatacgagctgagaatgcggatcgtttcaggtctgattgaaagcggtaccattttatcagaaaatacaatcgccgccgagttttcagtaagccgttcgccggttcgcgaagcgctaaaaatactcgcatccgaaaaaatcatccgcttagaacgaatgggagcggtcgtaattggtttaactgagaagaaaatcgcggaaatttatgatgtgcggttactattagaaacatttgtctttgaacggcttgtcaaaatagacattgagcctttagttaaggatctcagcaaaattcttgaaatgatgaaagtctcaatcaaatatgaggacgctgacgaattttcatttcaagatgtgctgttccatgaaacgattatccgagcgattgatcattcatacattcagatgatctggaacaatctaaaacccgtcatggaaagctttattcttttatcgatgcgggtacggttaaaggaaaagtatgaagacttcacaaggatcttagataaccacgagctttatattcaagccatcaaaacaaaggatagggtgctgatgattcagtctcttcaccaaaactttgatgatgtgcaggataaggtagaagacctatggctctcacaacaaatgctggcaaaaggagctgaatacaacaatgactagttatatgttaggaatcgatatcggcacgacaagcacaaaagctgtgctgttcagtgaaaacggagatgtggtacagaaagaaagcatcggctacccgctctatacaccggacatctcaacagcagaacaaaatccggaagagatttttcaggcagtcatccatacaacagcgagaattacaaaacagcatcccgaaaaacaaatctctttcatttcgttcagcagcgccatgcacagcgtcattgcaatcgacgaaaatgacaagccgctgacgccatgcatcacatgggccgacaacagaagtgaaggctgggcgcataagatcaaagaggaattgaacggacatgaggtgtacaaacggacgggaacaccgattcatccgatggcaccgttaagtaaaattgcctggatcacgaatgaaagaaaagaaatcgcttccaaggcaaaaaaatatatcggcatcaaagaatacatttttaaacagctgttcaatgagtatgtcatcgattactcattggcatcagcgacaggcatgatgaacctgaaaagcttggcttgggacgaagaggcactgcgcatcgcaggcatcacgccggatcacttatccaaactcgtgccgacaaccgagatctttcagcactgcagcccggaaatagcgatccaaatgggaatcgatccggaaacgccttttgtcatcggggccagcgacggcgtgctgtccaacctcggcgtcaacgccattaaaaagggagaaatcgccgtcaccatcggtacaagcggtgccatccggacgattattgacaagccgcaaaccgatgaaaaagggagaattttttgctatgccttgacggacaagcattgggttattggggggcctgtgaacaatgggggcatcgtccttcgctggatcagagacgagtttgcctcctccgaaatcgaaacagcgacacggctgggcattgatccatatgacgtgctgacgaaaattgcccaacgcgtcagacccggttctgacggtctgctgttccacccatatctcgccggagaacgcgctccgttgtggaatccggatgtacggggctcatttttcggcctgaccatgtcgcataagaaagagcatatgatacgcgcggcattggaaggcgtcatttacaacctgtacacggtgttcttggcgttaactgaatgcatggatggcccggtaacccgcatccaagcgacagggggatttgcaaggtcggaggtttggcgccaaatgatgtctgatatcttcgaatcagaggttgtcgttccggaaagctacgaaagctcatgtctcggcgcctgcattttaggcctgtatgcaacaggaaaaattgactctttcgacgccgtgtccgacatgatcggcagcacatacagacatacgccgatcgaagactcagccaaggaatacagaacattaatgccgattttcatcaatctatcaagattattagaaaatcaatatacacaaattgcagattatcagaggggcttaatcacacacaaatagtacatgacatgaaggggagggcattaccatgccgttaatcatcgttgcacttgggatcttagcattactatttctgattatgggcttaaaattaaacacatttatttccctgctggtcgtatcgttcggcgtggcactggcactcgggatgccgttcgataaggttgtcagctccatcgaagcagggataggggggactcttggccacatcgcgctcatcttcggactcggtgcgatgctgggcaagctgatcgcggattcaggaggcgcacagcgcattgcgatgacgctcgtcaacaaattcggcgagaaaaatattcaatgggccgttgtcattgcctcatttattattgggattgcgttattttttgaagtaggactggttctattaattccgattgtctttgcgatttcaagagaattgaagatttctattttatatctcggaatcccgatggtcgcggcactatccgtcacacacggtttcctgccgccacacccgggacctacggcgatcgccggtgagtatggcgcaaacattggagaagtgctgctgtatggctttatcgttgctgttccgacagtgctcatcgcagggccgttatttacaaagtttgcgaaaaaaatcgttcctgcatcatttgcgaaaaacggcaatattgcatcactcggcacacaaaaaacgtttaaccttgaagaaacacccggctttggaatcagtgtctttactgcaatgctcccgattatcatcatgtcggtcgcgaccattatcgacctgcttcaagaaacaatcgggtttgcagataacggaattttagcttttatcagattgattggaaacgcatcgactgctatgattatttcgttattggtcgcagtctatacaatgggcatcaagcgcaacattccagtcaaaaccgtgatggattcttgttcaactgccatttcacaaatcggcatgatgctattgatcatcggaggaggcggcgccttcaaacaagtgctgatcaacggcggtgtcggcgattacgtagcagacttattcaaagaaacggcattatcgccaatcattctggcatggctcatcgcggcgatcctgcgcatttctctaggctcagcgactgttgccgcactaagcacaacaggtctggtcattccgttattgggccattctgatgttaacctggcgttagtcgtactcgcaacaggcgccggaagtgtcatcgcttcacacgtcaatgacgccggcttctggatgttcaaggaatacttcggattaagcatgaaagaaacattcgccacatggacattgctggaaaccattatttccgttgctggactgggattcattttattgttaagtttagttgtatgaaattaagaaggagctgtaacacatgttcaattcgattggtgtcataggcttaggcgtaatgggaagcaacatcgccttaaacatggcaaataaaggtgaaaacgtcgctgtctataattacaccagagatttaacggaccagcttatccaaaagctggatggacaatctctcagcccgtattacgagcttgaggactttgttcaatcgttagaaaaaccaagaaaaatctttttgatggtcacagcgggaaaacccgtagattccgtcatccaatcattaaagcctttgcttgaagaaggcgacgtcatcatggacggaggaaactcccactatgaagacacagaaagaagatatgacgagctgaaggaaaaagggattggctacctgggagtcggcatttccggcggtgaagtcggcgcattaacagggccttccatcatgccgggcggagatcgcgacgtctatgagaaagccgctcctatcctgacgaaaatcgcagctcaagtcggagatgacccttgctgtgtctatatcggaccaaaaggggcagggcactttacaaaaatggtgcacaacggcattgaatatgcagacatgcagctgattgcagaagcgtatacgtttctaagagaaacgcttcatctgccgctagatgaaattgcatctatatttgaaacatggaatcaaggtgagctgaaaagctatttaatagagattacagctgagattttacgcaaaaaagacgaaaaaacagggcagcctctgatcgatgtcattcttgataaaaccggacaaaaaggcactgggaaatggacgagcatgcaggcgattgataacggcatcccgtccacgatcatcacagagtccttgttcgcccgctacttgtcatccttaaaagaagaacggatggcagctcaagacgtattagcaggcccggaagccgaagaaaaacacttggataaagacacctggattgaatacgtcagacaggctctttacatggggaaagtatgcgcctatgcacaaggctttgcccaatataagatgtcatctgagctttacggctggaatctgccgctcaaagacattgccttgattttccgaggcggctgcattatccgcgctgatttccttaacgtgatcagcgaagcattcagtgagcagccaaatctggcaaacctgctgatcgcgccttatttcacagataagctccatgcctatcaaacaggcctgcgaaaagtcgtttgcgagggaatcagcactggaatctccttcccatgcttaactaccgcgctctcttattacgacggctaccgcacagggcgttccaatgcgaacctcttgcaggcgcagcgcgattactttggcgctcatacgtacgaacggactgatatggacggcgtcttccatacgaattggtctgaataacctgtcatcaaaaacacggtcagttttcaactgaaccgtgtttttttcttctatcccaaacaacagaagacataagttatgttttaaatatcataaacagtgatacaataatagctagaaacaatccccaagatcatcatgtgacagcagcttgctgttccgttctattctgcttttggccattgtcctttgcccttgcccatggtgtcataaaatgttcaaatgccaaaacggcctgtcattctgatttacaaaagtccctgaaaaccttgtctaattgagaatcagcctctcatttgttataaaagaaatgcataaatcctacctgtcacaccttaaataagttgaaaaaaagtaggttatcgcttgacaaaaaatatatattaattaataattcatatataattagaattattattgaaagcgaatatgctttctaatacatttttaggaggaatatacattatgtctttaatcggtaaagaagtacttccattcgaagcaaaagcattcaaaaacggtgaattcatcgatgtaacaaacgaagatttgaaaggccaatggagcgtattctgcttctacccagcagatttctctttcgtatgcccaactgagcttgaagatcttcaagaacaatatgctgctcttaaagaattaggtgttgaagtatactctgtttctacagatactcacttcgtacacaaaggctggcatgacagctctgaaaaaatcagcaaaatcacttacgcaatgatcggtgacccatctcaaacgatctctcgcaacttcgatgttcttgacgaagaaactggccttgctgaccgcggaacattcatcatcgatccagacggcgttatccaaactgttgaaatcaatgcaggcggtatcggccgtgacgcaagcaaccttgtaaacaaagtaaaagcagctcaatacgttcgtcaaaacccaggtgaagtttgcccggctaaatgggaagaaggcggcgaaactcttacacctagccttgatctagtaggtaaaatctaaggagtgcattcaattggtacttgatgcaaacatcaaagcacaattaaatcaatatatgcagctaattgagaatgacattgttctcaaagttagcgcaggcgaagatgacacttctaaggacatgctggctctcgttgatgagctggcttccatgtcatcgaaaatttcagttgaaaaagctgaattaaacagaacgccaagcttcagtgtcaatcgtgtcggagaagacactggcgtgactttcgccggtatccctctgggccacgaattcacatcattagtgttggcgctgctccaagtgagcggcagaccgcctaaggtggaccaaaaagtcattgatcaggtgaagaagatcagcggtgaataccacttcgaatcttatatcagcctgacatgccacaactgtcctgatgttgtacaagctttaaacatgatgagcgtgctgaacccgaacattacgcacacgatgattgacggtgcagcatacaaagcagaagttgaaagcaaaaacatcatggcagtgccgaccgtttacctgaatggcgaatccttcggaagcggccgtatgacgcttgaagaaatccttgcgaaaatgggcagcggcgcagatgcatctgagtttgctgacaaagagccgtttgacgttcttgttgtcggaggcggacctgctggtgcaagtgcagcgatctacactgcacgtaaaggcatccgcactggggttgtcgctgaacgcttcggcggacaggttctcgacaccatgagcatcgaaaacttcatcagcgtcaaagcgacggaaggaccgaagcttgcggcaagtcttgaagagcatgtgaaggaatatgatattgatgtcatgaaccttcagcgtgcgaaacgccttgagaagaaagatctgttcgaacttgaactcgaaaacggcgctgttctgaaaagtaaaacagtgatcctttcaacaggtgcacgctggcgcaatgtcaacgtacccggtgaacaagagttcaaaaacaaaggtgtcgcatactgcccgcactgtgatgggccattgtttgaaggcaaagacgttgcggtaatcggcggcggaaactctggtatcgaagcagcgattgatctagcaggtattgtgaatcatgttactgtgctagagttcgcgccggaactgaaagcagacgaagtcctgcaaaaacgtctctacagcctgcctaacgttactgtcgtgaaaaacgcacaaacaaaagaaatcacaggtgatcagagcgttaacggcatcacatatgtagaccgcgaaacaggcgaagaaaaacacgttgaacttcaaggtgtattcgtccaaatcggtctcgtgccaaacacagaatggttagaaggaacggttgaacgcaaccgcatgggcgaaatcattgtcgacaaacacggcgcaacaagcgtaccaggcttatttgctgccggcgactgcacagacagtgcgtacaaccaaattattatttctatgggatcaggtgcaactgccgccctcggcgcgtttgattacctaatccgtaactgataaaaaaatccgctatattgccagattggcaggatagcggatttttctttttctacagaaaaaacccgaaccaggcactccggtaaaagtgctcgattcgggccagcttcttataggtcctcgccattcgtttgaatgacatttttgtaccactcaaaggaatctttcttataccgcttcatggatccgtttccttcattgtcacgatcaacatagatcatgccgtagcgttttttcatttcgccagttgtgaaggagacaatatcaataatgccccacggcgtgtagccaattaaatcaacaccatcgtacgtgaccgctttttctaatgcttcaatatgcgattttaaatattgaatgcgttccggatcatgaaccttgccgtcctcctccagcgtatccactgcgccaaagccattttcaacgatgaataacgggatttggtaccgatcataaaaacgatttaacgtatatctcagcccggttggatcaatcgcccatccccagtcactcgaagtgatatacggattttcgacaccattcggcaagccgccattgacaatatcgccagtgttatcatttttcacatcgcttttcacagttgttgacatgtaatagctgaagcctaagtaatcgacggttccgtttcttaaaatctcatcatcgccgtcttcgaatgtgatgttgtagccttcgcgttcaaattccttcaacgcgtagcttggataataaccgcgaacctgtacatcagggaagaaatagcgctgcctcatttcttcttcagccagcatcacatcttcaggattggaggagaaaggataaatcggcacgtgtgataccatagccccgatctggaactctggattgatgtcttttccttttgccactgctaaggcgctcgccactagttcgtggtgtgccgtttgatacatgacctccttggcgttttcgttttcgccaaccacaacacctgaattcgtccataggaacaacggattgttcacatccatttggttgttgatctcgttaaatgtcatccagtactttactttatctttgtaacgggtaaagcaagcctctgcaaagttgacgaagaagtccacgactttccggtttctaaagccgccatattctcttgccaggtgcagcggcatttcaaagtgagacagggtaatgaccggctcgatcccatgcttcagcaattcatcaaacacatcatcataaaactgcaaaccagcttcgttcggttcagcctcatcgcctttcggaaaaatccggctccagccgatggacgtccgcagacattttaatcccatttccgcaaacaaagcgatatcttccttgtatctgtgatagaaatcaatggcttcatggttcggataaaactcgttctcttcaatcgtatccgtgatttttctcggcacgccatgtgcacctgctgtcatcacatcgacgacactcggccctttacctccttgattccatccgccttcaaattggtgggcagctaaagcaccgccccataaaaaatcctttggcatgtttcccatgtttaattcctcctcagcttacgactgtaaatattttttgatgcaatgcactttcctcaatctcttcaatgaaagctttaacaaactcatcgccttttttgacggtatcgccttcttttaccttcaaggaaaaaggcgtgccgtcaaatgtcaccgtatccagcccgatgtgcgcaagcaattcgacgccggacgctgaacgcagctttgtaggcgccaccatgacaaccgtaataacgccgggatggtggcatcgattttacgatatccttcgctttaggggtagaccgcttcagcaccaatcgaagtctggtagcgcagcgagaagccccaatcacattctcttccccgcctacggcctctaaaatgtcttttgctagtctcgtataatctctcacttccccgacatttcacccacccctttgatttggttgcgctttcattataattgtaccggtataatatatcaataccgaaacaaaatatttacgcactaactatcattgtaagcggtttatgctataattttggcagtgaaactaaacgaataaatgaggaatgcgtatgttaaaataccagcaaatcgcagcggaaattgaaacatatatagaagaacaccagcttcagcggggagacaaactgccagtcctagaaaccctcatggcccagtttgaagtcagcaaaagcacaatcacaaagtccctcgagctattagagcaaaaaggcgcgatctttcaggtcagaggaagcggcattttcgtcagaaaacataaacgaaaaggctatatcagccttctgtcgaatcagggatttaaaaaagacctcgaggatttcaacgtcacctcaaaagttatcgaactagacgtgagaaagccaactccggaagcggcggaaaacctgaacatcggaatggacgaggacatctactatgtcaaaagggtccgttacatcaatggccagaccctttgctacgaagagtcttactacaacaaatcgatcgtgacgtatttaaacaacgaaatcgtctcccactccatcttccattacatccgggaaggactggggttgaagattggtttttctgatttgtttctgcacgtgggccagcttaatgaggaagaagcggaatacttgggattagaggctggactgccgaagctgtatatagaaagtatttttcacctgacaaatgggcagccgtttgattactcgaagatttcgtataattataagcagtcgcagtttgtcgtacaggctaatagttttttgctgtagagctgcttcactatggaaggtggtcgacatgaacaaaatcatcattcctgcaatactagccatctttgcgctctggatattcttacagatttcactagagatgagcatcgttaagaatccaatgaactactttatcgtattcattatctttttcctctttgtaaagatggtgaaagaaaaacaataatagtttactttgaacaggaaaccagatttgacatctggtttttttgtgtttcactttattcatccgtttcaattgtctctaaaagcagttatgcggtactatcatataaaggtccaatgtttaaaaataatgtcatacttttaaattcaccttatcatgcacatgatcatatataggggtttattctaaaaaggggatggacgattttggaaagcaagtacctagatctactcgcgcaaaaatacgattgtgaagaaaaagtggtaacagaaatcattaatttgaaagcgatattgaacctgccaaagggcactgagcattttgtcagtgatttgcacggggagtatcaggcattccagcacgtgctgcgcaatggttcaggacgagtcaaagagaagatacgcgacatcttcagcggtgtcatttacgatagagaaatcgatgaattagcagcattggtctactatccggaagacaaactgaagttaatcaaacatgactttgatgcgaaagaagcgttaaacgagtggtataaagaaacgattcatcgaatgattaagctcgtttcatattgctcctccaagtatacccgctccaaattgcgcaaagcactgcctgcccagtttgcttatattacggaggagctgttatacaaaacagaacaagctggcaacaaggagcaatattactctgaaatcattgatcagatcattgagcttggccaagccgataagctgatcaccggtcttgcttacagcgttcagcgattggtggtcgaccatctgcatgtggtcggcgatatttacgaccgcggaccgcagccggatagaattatggaagaactgatcaactatcattctgtcgatattcagtggggaaatcacgatgtcctttggatcggcgcctattccggttccaaagtgtgcctggccaatattatccgcatctgtgcccgctacgacaacctggatattattgaggacgtgtacggcatcaacctgagaccgctgctgaatctggccgaaaaatattatgacgataatccagcgttccgtccaaaagcagacgaaaacaggccagaggatgagattaagcaaatcacaaaaatccatcaagcgattgcgatgatccaattcaagcttgagagtccgattatcaagagacggccgaactttaatatggaagagcggctgttattagagaaaatagattatgacaaaaacgaaatcacgctaaacggaaaaacatatcagctggaaaacacctgctttgcgacaatcaatccggagcagccagatcagctactagaagaagaagcagaagtcatagacaagctgctattctctgtccagcattccgaaaagctgggccgacatatgaattttatgatgaaaaaaggcagcctttatttaaaatataacggcaacctgttaattcatggctgtattccagttgatgaaaacggcaatatggaaacgatgatgattgaggataaagcctatgcgggtcgtgagctgctcgatgtatttgaacggttcttacgagaagcgtttgcccacccggaagaaaccgatgacctggcgacagatatggcctggtatttatggacaggcgagtactcctccctcttcggaaaacgcgccatgacgacatttgagcggtatttcatcaaagagaaggaaacgcataaagaaaagaaaaacccgtattattatttacgtgaagacgaggcaacctgccgaaacatcctggcagaattcggcctcaatccagatcatggccatatcatcaacggccatacacctgtaaaagaaatcgaaggagaagacccaatcaaagcaaacggaaaaatgatcgtcatcgacggcggcttctccaaagcctaccaatccacaacaggcatcgccggctacacactgctatacaactcctacggcatgcagctcgtcgcccataaacacttcaactccaaggcagaagtcctaagcaccggaaccgacgtcttaacggtcaaacgattagtggacaaagagctcgagcggaagaaagtgaaggaaacgaatgtgggtgaggaactgttgcaggaagttgcgattttggagagtttgcgggagtatcggtatatgaagtgagggatgtggggttcagggattatattctttgggcccatttttacaatcaactataaatcaacaaaaagcctctcaaaatagggttttgagaggctcactatcaaacatgaaaagtacttctattagtgttaggtcttatgacttgatctacattctcagcaatcgatttataattttgtttttttgataaacgatcataatccccaacaatataaaactctttttttgcccttgtaactgcaacattaattaaattaggctttgagcacgaccaatttgccgctccatcactattttgatctgtccccactacaaagtaaacagtgtcggcttcttttccttgaaaggtatgggtagttcctattgagcttcgagtccaatcatttactattttctttggtacatttaattctgctaaccgctttttaattgtttttctgagaccatctttcactgctgtaaagggagtaataacatataaatcaggagcatttaatgtattttcccatttttgataaatctcttcagcaactaaatctgcctgctcttttacaaactgcttattaaccgctactcccttacagtcaaaccattcgcttttcccttgtttttttatcgctaaaaccattttattatcataagcaatttgattagcgattgtaaacattggatttaagcatctcctatgaacccataaaggtatccctatccactgtcctttattgttatacattccaaatggattcgccgcatccgccagtgattgtacagaactccctatttcaataaaccgatcttcaataccataaaatttttttatatctcctaatattgttcgatcaatggtgacaactggttcaatctggattggatcaccaacaacgacaactttttgagacctccataatgcgcctgccgcttgttgcggagtagcttgtcccgcttcatctataaataagtaacgaataaaatcacgaccaactcctttatacattgttcgaacactggcaaaggttgtacttattacgggtgtgattaaatggattacaccccacatatgttgtaaccacattctgtgctcagtctgatttaaatctaacttacttcgataatttaacaaacgcaaacttgattttattgctttataattaaatatcaaaaacaatttgtggactttcattccctttaaaaaaagaagccctctttcaaaattcaattcatcagttagccaaggagtatgtaattgcctatattcatatgcactttgagaattggtccaataattatcatcgggtattactaacccctgatttttgcatttattgttgatagaatccctatatttctttaactccatccttatttgattcgatctcatctgcaaaagatcccattccttttcttcattttttattttcatagttattttttgcagttgatcttccatctgtaataatttgtttctttttgtatgaaatattctttgaaaaaaagttggtttagaaagcgtgtgaaactctctctctaacaaccgtttctgttgtttataatgagctgtctttaatactaacttttcttgttctgcctctagtaacaataactgattatttatatccttatattttttaaaaatttcgcataacgattgtagttctgctttcttttgtttaactgatttcaatgtttgttggaaatctgttactgcattcttccaatctgttaagcttatttttttattttctcgttctaattgctcgatgaatgatagttcaaattcgttattatttctataataaagttttttgtaatagtgagatatattttccgactttcctaaagatgctgagaatagtccccaagtatctgtctcttcacctagaagagcctttgccgcaaaaggaaacatcgataattcctctgcttctaatgcatatgctttttcataagaagaaaatacattttcatctgtaactttacgtataacttccttctttttaggaagatcttttgagatattttcaactgctccattattgcttgaagccactaccatagaatactgattaatagatttatcaatttcataaatagtataatgatagccatctaaaactaatttctttatttttttcagagctttttctgggttttcaaaacaagccattttttctgctttttcaaccatgagatttgcaaaaatatcttttaacagtgtcgttttccctgttcctggcgggccattcacagagcttatcttttgattgttatttataatttgatttacagctacttgctgcattaaggataatctatgttcaacaggtgacggccacctgccgttaggtacatttttaggctgcaacacatcttcaattaaaactctattttcatcaatgttcgttctattatcaaccccttcaataaattgccgtagtgtttcattttctccttgtgagataatatctcctaagtcctctaagaaaaagctatgaaaattatttacccgtccatcttgtccaaccttcaaaatttctttctcaaaataatgaagcgccatattatctattcgtaaaaaataccgttcatatactccaagtactttcttaagggctttttctgttactccatttacaaagatggcatcaacctgttcctcaaataatctcaactgatctcgaaatgtagtcatcaaatcatcatatggcacttcaagatgttcgtttattaatttcatcacatacataagtacaggtacaaatgcagaatcctttacatacttgcctgtatggtcaactaaaaaagacatactaaataacattttctgatctctattaatcatttcttcattattttggaatagatcacgtagatagctaacaagtttatgttgctcaaagcaacctaaatagtaacgaaattgaataaaatttttttcagagtccttcaactgatgcctctcccaaggcctttcagaaaaaagaacttgttctgttttctttcgttgttgaccatctaaaaaatggcttctactcaattcatctcctataccattgactccgcttggtgataaagcctcaactaagtgccatgcccttaatacagaatttacatttatcttccccataattccctcctatttttaacaacatcattcggttattgtcctcaattgatccaactggtatctgtaaaaaatccctaaactgattgatcagtctcttttctttttttcgacacatttgtttaaatattgaataattaactagatcacacattaaaattattagattttagaacatttcattttagtaaaaattcatgactgattcataaactctgagatcatttgttaaatttatgatacgatgacagtaaaaaagacataacaggggctagtcatatgagtgaacttgtgtttgaaaaaagagattttaatacagaacaaattcttgcgttgaaggcatctcgattagataacaatccgattgtatacattctttataacgaaaaaaagaagccgactgcatatattgggcagactgtgcaggctgcacgacgattgaaaaatcatttgagagacaagaagcgaataagtttaacgcgaaccattttcattggtcatgaaagatttcatcagtcagcttcctacaatattgagacaaatcttattaattactttattgccgaaaatcactaccaattgcaaaatgtcagtcagacaagatcgagagaaatgcatcattattatcaaaaagaattttataacgaacatctttttgaggaaatttggaatcagcttcggaaagagaatgttgtcagcgacacccttgaaaacctcagaaataaagatatttacaaactatctccgtataaagagctctctccccagcaggtggaaatcaaaaatgaaattcttgatttttgcaaggcgcatattgaaaaaccaggtaaccatgtcatttctatagaaggagatgccggaacagggaaaagtgtcttactgagctctctatttaacacgattcaggatttatctaaagatgaaaattcacatttaaaaaacaagaacaattacttacttgtgaaccatggtgaaatgctgaagacgtataaaagcatcgcaaacagcttaccaaatttaaagaaaaaaaacttaatgaagcctacctcctttataaatcaaatgtcaaaaacaggggaaacagctgatattgtattagtagatgaggctcatctgcttttaaccaaagaggatagatacaataatttccactatcgaaatcagctagaggaaatcattaaacgcagtagtatcactattgtcatcttcgatcctaaacaagtgttaaaaattaaaagctattggaatgaaaggttgcttgaggagatcaccaatcaatatcatgcgaaaacagtaaagctcacggagcaaatgagaatgaatgcaaatccagacacactaaagtggattaaccattttgtctcaaaacaattgctccctctgccgcaagaaaataatgataccttccaactcaaaatctttgaggaccatgccgactttaaagctgcaattgaaaaaaagaataatgaagtaggtctatcacgtattgtctcgacctttgactatatccataaaaaagatggtgctacttatatggtcgatgaggaaggcattaacatgccatggaattctacaaatgacaaatggacttgggcagaacatgcagattctattaaagaggttggttcaatctatactgttcaaggttttgacctaaattatgttggcgtcattctaggaccttctgtcagctataatagtgaaaaggatgagcttttcatcgacactgcaaaatataaagatacaggcgcattcaccaaacgagatgacatgtctgccgagaaaattaagaaaataaaggaagagattattctaaactctatcaacgtcctcatgaaaagaggcatcaacggtctttacatttacgcaacggatgtaaaattaagaaatagattgctagagttaaaaaggagaaggaaaaaatgagcgaaatcaaagatttaattaacacgattaatgaatttagagacgcacgcaactggagacaataccacaacccaaaggatcttgccatctctatttcaattgaagcggccgagctgttagaagacttccaatggaaaagcagcgaagaagcactcaaagcaaacgaggaaaacattcgtgaagaaattgctgatgttcttatctattcgctgatgctttgttcagatcttaagatggatgtgaaagagattattgaggagaaggttgtgaagaacggtcggaagtatccggttcaagggtaattatatttcttacaataattaaagcaatcttcactcctcaaaaaataaaagtgcatgacgatatatttttggaatgattaacaaatagattgattcttctgaatatattgtagctcaacttaccgctgagtgacagaaattaatcatagatactgagtttaaaatttactttggatttactaatgtaaattattaaacttaggattttattaaaacaggcatattcaagtatgcctgtttactactttaagaaagaagtaacctcattcacttatggtaaggctctccgtagtgtatctacttttgttctagttcttttaaaacctttaagtcttcataataccttaacaccgtactttgcattactaactttctattggcagaatctctaatgttacgaaatttctcattataaaacagagtaaaatcatgtattgtgctaaataaggttatgttagcttgtacccattctgataatgtctcatcagaaaaaggtaagtcatttgattcaaaaaataaactatccaacactgacgaataaggtgttacacttgcaaataactcatcttcaaaaatagtctcattttgatactcattaaataatgaaattatagattcagcatatgttatcatttgatacctaatttctttaactttatatagtacttcatcgttaggcttggtattatcaaaaataaaattactaattatcttatattggggataaaactcaaaatgaacaccttttattaaatgtttattagagcctttcaaactataccaataagtcttatcttgattatcgcttacccaagtagttttacaataataatttcctcgtaaaatatcactttcataaaaagtgaaataaatccatattatatctgatggacagcctttatatctatcttcttgtattttgttattatatacatcgcaaaacagtaatctttttttaatttttgttgagacgtctgctatttctgcatccgagaatggtttcttaagaagtatttttgccgcgtacctttttttagaaccatgatggacaggttccacactcttaatgatgtaatcctcgttttcaaggtaaatattatcttttttataaggagtatactctgaaattttaaaataaattgtacctcctatattagctctatatatagcatgctgaggtgtatccggattatttaaagtatgaatctcaagtaacctctttacccacaactgcaaatcataaagtgaaatttctcccttttttattaaaaatttattcgtcagtccatcgcataaaatatttgtaaatatacttccattgctccctccataagaaggttcaatagcgttactaccacttaatatcgcataaccgctaccttgaaaagattctatagattcttctaaattagtgctttttgtaccttcaactctaaaattacctgaatagcagcagtctataagcaatactttgcttttagctaatgactcgcctattttattaattatgtcctgagtacataataaaccatcgctaaaaacaatattatgaatttcactagaagtcccatgacctgagaaataaaaaataaatatatcatctttttgtaaattgccaataaaaagctcaagggcatgtacaaaatcgacgattgctacatgaccgttatttgtcatacccatttgaaaaatatccatatcatccagctgtaatccttctcttaacgctttattaacattaattatgtctgttttacaaaatggtaaatcaggtgcaccgatacctgaataatcactaactcctactataaatgcctttatccttcccatataaatcaccccagcttcacttgtttatctgattaagattgtaataatcatataaatagacaagcccaatttttattaaagaaaattgggcttgtctatattattctggttgttctaatcgtgattgaatgtttttccagtgtttcttcacttgtgtttccataagatttatagtttttgaatcttcatcaaatatcttctgtgctctttcaacgtaactaataaaattcccatgccctttcttactttttcccaagtgagagtagttcttatataattctctcctatacgatttacgaccgaatttttttgatttacgattgcatatccttactttacgatatgctctcgtataatacttaaaaagacttttttctctaattcgaacttctttaccattaaaactgaaccctagatagtctaatattgtctcatttaagtctaaatcgataatctgattatcgttataaaaataattccctgtcttctcaagttgaatttctaaatttggaatctgttcttttatatcttccaaaattttttgatgaatttgatagttatagtcttgaatgcctccttcaataggaataactataattaaatcatcacaatatcttctatatagcccattttgttctttaacatatttttgtatttttttatcaaagtccagcaaataaatattagaacagactgaactgatacccgctccttgaggaattccataccttttagaattcttgtaaatatttttatgcttaaatgctctaaattccttctctgtgaaatatttataactactttcaatttcactttcagtgtattttgtctttaattctgcttctatagtatctttaataaagtaactaaatcttgttatattcttgaagacattataataatcgtcaggtaaggtatccttttttagaacatagcggattttctctttaagatacctatgatccaatgtatcaaagaaattagtaaagtcagcaacaaaaatatatgcactttgctgcacttttataaaatcaataacttctttagcgaagttaatattactttttccagataagttattccgatatgcagttgcaacttcattaatacctagttcatctacaacagaattatagtggttatttagcttgtccccatagtacttatagatatagctatccatatgagacgcatagaaaattttacgaactttttcttttcgctttttttcttttctgctatatttttgaaatttaatttcaaaatgcataaacgggtaaaaaccatgtttagcaacccatcgagggttctggattttactcttaactttttcaattgattttttattatcaaggtgcttataaccctttacacgatactttttttcattcatatttggcagagctagcaggggtatgtaatcgtagcctattactctctatcaaaaaccctgctagcatactctcctttcgaattatagaccattgctagcctataaagaggctactgaatgcactaatagcttatactataatcagtatattaaattggttgtttatgacgattggaggtatccaaatgccaagttattcagaagcgttatcgattgtaatcgactggataagtattatgattacaattgagataaagcttgacagaaattcaccaatttccctcataactacttttatgaggcgttaaccatattaatattaccatctaaaatttaaatagtcaaaaaagtcaatcaaaagtcatgttttgacctaagatctgaaattaggtatcttgaaaaatataaaatatattatgtaaatatatgagttttttatttttagaagtcgatgatcttcaactgatttgggattcaattaatgatactcaactagttttccacccaatataggcatcaaccggatcgattgattatctgaaattagaacattttacgtaggaaaaagaagtttctttaattcttgatagaaacctttttagtagtttattgtctcttgctaaaaatggtgatctaaaagacactacggaaaaaagaatgattgcttttttaatgttatgggctcaattgaatggaggttccaatcagtgctggattagcaataatggaaaatgcatcaagatacaacgattcttgcaatgctaaaatagagctaaataattttaatgatattttcgatttttatccacctcagatttggttaaatttagctcgtggcacaatagaccagattccaaagtgtaactttttcaatattccatatgaaaactcaatcacttatcatgacactaatgatcacttcctaatgaattatgccagcatgttgcatttagttaatatatatcgagactctgacatggctcctttagaaaaattattagaagtcctaagttggaactttgacaatttactcatctctcaatatatcaatagatatcttgttatgttattttccaatcaaaatggtatcaaagcacctaaacacgctaatagcgatttattagaaagaattgaaaaaggttgtatgaatcaagcatgggatttaacctatctatcatgttggagtacactttactggaatgaatcaaaaacgcatgaggtttttttatttgctaccgccgataatctgttaaagaaaatttttattaacacacataatggtagagatttatttaatttaattaatattgcttttcctaaaagaagtgctgataaaatcattcaattctatattgaaaaaacaagaaacagaattttggggataatccaactcaatatttcaaatctttaattgagaaagaaaaaaagcatttgaaacaatctgtgggttgataattttcagctgtattacctaatgtcattccctttgttgtaaattcaaatatacaatacaaactttaatataaccaaaacagtccctcccccatttgttggggaagggactgttttggtatacaggtaaaatctcatctacttatgatacggctccccacgattaatccgaaaagcccgataaatctgctcaactagtatgagacgcatcaactgatgaggaaacgtcatttttgagaacgacagcttctcgtccgctcgcttcatcaccgcgtcgctcaatccgagtgatccgccgatgacgaaggtgactttgctttttccatatgtagccagcttatctattgtatcggctagttcttcggatgttttcatttttccttcgatggcgagggcgatgacgtggacgtcggggctgattttggataggatgcggtcgccttctttgtcttttatgattttcatgtcctggtcgcttaggttttccggcgctttttcgtccgggagttcgatgatgtcgatttttgcgtaggccgaaagtcgtttggtgtattcttcaatgccttgcttgaggtatttttcttttagttttccgattgtcacaatattgatattcacaggtcatccccactttaaaaacaagttattcatatatgttgtccacaattgtggatatcttttctgtattttgtgtaagatcattcgttccccactatatatactgcggggtctccacataattcacaggctgtggataaactgttagtatgttcgatttttctgatttcgggcggcagctcgtggtcgtctatgtacatatccagcaccgtttcgatgtgttcttcacaagaataatacgcttgtttcatgttcaaatcctccgatgttttcttccatttttacaaatgttctcttctcaatataacctatttattcacatgttagtagtgcttcgggctgagttttatccacaattcgacaaacaagctgttgatgactctatttcgctcgtgtgttagtttggatgtaaccgatgtgtgaggaggtctacatttgcgctttagatgggtttggctttttgtgatcatgttgctgcttgctgggtgtcagccgtcttattgggtgttggagaaggatcgaatcggtgaaggcagtccagacttagaaatatacgctaattaccttcaaatgcatgatgatgtaaaaggatatcaagtcttcaccatatcagaaggcaaaaaaatggtcgtcgtgtctctcggaagcagcgagaacgaaaaacagcttgaggtgtcagacgtcaaattctcacctaaagaaacgattgtaactgtgaaacgaaaacctgcttccaaagctaatgagaaaaacccttatattctgattggactcgataaaatcgaaggggatttaattgtccaagacgaaacaggatatcactttgaagaaacagattaccagcaataaagccggcgttctgagaacgtccggctttttcttttacttcaatgtcccatgcgggtcgatgacgaattttttggctgcgcctttgtcgaagtcgctgtagccttttggcgcgtcgtccagagaaatgacggtggcgttgacggcttttgcgatttgcgctctgccgctcaggattgctttcatcaaattgcggttgtatgtcatggcgggtgtttgtcctgtgacgaaggtatgggctttagcccagccgagtccgaagcggatttttagtgagcctgttttagcgtcggcatcctttgcaccgggatcttcggtcacgtataagcctggaatgccaaggctgcctccgacctgggtgacatccatgatcgagttcagcacggcggcgggcgcttctccttgattgccgtgcccagatgcttcaaagccaacacagtccactgcggcatcaacggttggttcacctagtatttgttcaatttgttcgccaaggcggtcgtgtttttgcacgttgaccgtttcacagccgaagcttctcgcctgtgccagtctgtcttcgttcagatcgccgacaatcacggtggaggcgcctaggagctgagcggagtgtgcagctgccaagccgacaggccccgctcccgcgatgtaaacggttgaacctgtttgcacgccagctgtgtaagctccatggaagcctgtcgggaaaatgtcggacagcatggtcaaatcgagaatcttttctagcgcctgttctttatcagggaatactaaaagctgaaaatcagcgtacggcaccatgacgtattcagactggccgccgacccagccgcccatatcgacgtagccgtaagccgatcccggccggtccggattgacattcaggcacacatgcgttttctgcgttttgcacatcacacagcgtccgcaggcaatattgaaaggaacggatacgatatcgccctttttgataaattcaacatcacgccccgtttcaatgacttctcccgtaatttcatgcccaagcaccaagccttctggcgccgttgtgcggcctctgaccatatgctggtcgcttccgcaaatgttggttgtaatgactttgagaataaccccatgctcacattttcgattcacattcgcctttgggacgccgggcccgtccctcaagattaactccggataaccgatatcctccaccgctacagtccctttgcctttgtacacaaccgctttgtttcctgtcaacgccattcctccctttcatgtgtttggacgcttggtccttgaacatgacttcggtttggcatgaccctttccctttctcacgactgttttttctgtattcttataacaacaaatatgccaagaaagcagccaataatggttccgccgatgtctaagaagtcgactttacatccatttaacaggaatacagtaatggccgaaaccaggctgatcataactgccagaagaataacccgtttggtgcgcatgtaattcctcctttagattcgtttctaaaccatacccaaaatcctctgcaaatttcggttcaacaaaaaaagagacttcacaccagtctcttcataattagagatcaattaaaaaatttcctgagaaataatgtgacaatactggttaccaacgcaatcgccgtatacataacaacccaaaacatgaatgagctattacccgaagctaacgtaaataacaatatcaagctcgcgataaggacgatgagcggtgccacccaaaatcttttaaataaaaaatgaccggctataccaaatacacctgcaatgatcggaaaaccaaaaacgataaataaaacggcgatagctcccatactaacctccttgccctaaaaccccttcatcacctcaacatcatacagcttcaaatgactcttcggcgtcacgacatcctttaccttcccaatctctttttctttcattttctttccggttttcagactgtactgttcaatgtaggcaggcttgttatacgtgtatgtgaagtaatagaggctgctgcctttttgggtgatttctttgaaatcggctttcattttgtcctgggaaagggtgaaggcgatgtttgtttttcctgtcttggcatcgattttgtgtacctttccgaagccgtcaatgaaatacaggttcccgtcataagggaaaaagctgtttttaaagctgaagggcatggagctgtatatcgtttgttcgtcgtttttgtattcggcgatgtcgtgcagctctactttgccgctttttttgttgatcttgaccatttgatagagattgcgggctttttggccgcgaaccataacataaacagcttggtcgtccacagcaagctgggattcgactgaggctccttcccggtactgccattccgatatcttgtggtaagtgagcttcttttgatctgcttgaatctgaaggagctcatagcctttttcgtcagctgtcgggacaagtgcgtaaatggcgccatcatggaaaccggaggctcggatgtagtaggggatgacgtcttttttccactctccgtctatttggcggtacagctctgagcggtatccgtctttctttttgtcgtagccggagttgtataaggtgtaaaagccgtccgtgttttgcagaaagcctgcgctgtcgcctgtgtgctgataggttcttttatgagatctcaggccgtctttaatcgtataaatcttgtttttgtcctccagcatcacactgtcgccgtgaaccttggctgatcccagctcaaggcccttcatctgaaatgaagacagcgacccgtcctggctgataaacaaggcatagcttttcccaccgccaaatgcatcttgatccgcagaggttgaaaaatataacaggacttctttgtcatccaagaaaccggagtctcgaagatcctggtgacttacagttttatggctaggagaaatgaagacaaatagtgcgattcctgcgagaatcagcatggcgatggtaatcatccactttttcatatccttctccttagtaaatggtcatgatggttgtcgtatacgaagaacttgtgatgtcgcgcggatacacgcctaagcctccgttgctgtctatatcaatccctgcttttagcaaaaaggcagaccataggagctttgaacagtttttggcgccgtcatggcccgtatttctgttattgacgaagttaaatgagtatgggtcgccgacttttgataccgcccagtcggcagcagctgttttttgagatgaggatacgctgacggtttgcacaatggagttgtcttccacgtctctggcattatacgcgatctgcctgacgccgtcgctcgggacagattcaacaattttgtcagcggcggagtacatgccgacgtggccatgattgtagtaggctgtgtaggagttcgtgtaatagatattgcctttcgcgcttgtcgggagttttttcgtgccggacgacccgcccatgatagacatgccgctttccttggcgagccggtctccttctgctttatcagccgtgatttccttatagaactgttttaggataacgtcctgctttacgtgctgctgtttggcaatctggctggcagatttcatgatttcttccggtgtcgtgcctggctgcagtgcggcgatttcttcagcataatttgtgttctttacggctttggcgggagaaacgaacaggccgccacacattgtaagcgctaccaaaaacatcgacactcgtttcttcaacttcattacatctcctcttttcttgtgagtgtaggaaagggaatttcctcacccacattatattaggaaaataaggaaagtaactaggttatttacagaatttttagaaatcgtttacagaaaaaggcctttatcaggcccttttcgttaaatcttcttgctcatcactacgtctgtttcttgaaatccggtttgctcatatagctttcgcgccgtctgattatgggcaaagacatgaagggacagcttgcggattcccatgctgcgtgccgtttgatctaatgccgccaatgcttgctttgcgtagccctttccccgatacggttcatataacccgaaatcataaataaacgcttcctgctgcggatgctccggttcagcatgtatccagagccagccaacgatatccttttcattcagcttgaggctccacaaatggtgatggggtgtttccagccctctcggaagcagatcagtaaacgcctgcttagacaaaagctgtgcatcttcaggcagccatgttcccgcttttaccttttcttccgcgtaatgctttgttgtgtacgtgagataagaccgaaattcttctgtctgcattggggtcagcatgattgtcatatcatctctccttcatatattgactagaggattttacataaaatagaaagaggtgttactatcagaataagcaactgagattgataagtcactagagaaaggagtttcacatgaataagatcgcacccgcagaaatcgctagcatgctcaacgattggtaccttgccatcaagaaacatgaagttgaagaatcctcccgtttatttgaagaagtgaagcctttattggacgacatggaagaggatcaggaggtgctggcctacttctccttattggaactgcgccacaaggttttgcttcacgaggcgagaggacagggctttcagcatgaggagccttctcatatgaatgctacgtctgacatgctgaaatattacttttttctgtttgaaggcatgtatgaggcctataaaaataattatgacattgccattgggctgtataaagatgcagagcagtatctcgacaacattcccgatccgattgaaaaagccgaatttcacctgaaggtcggaaagctctattataagctgggacaaaatattgtatccctcaatcatacacggcaagcggtcaaaacgttcagggaagaaactgattataaaaagaagctggcttcagccctgattaccatgtcaggcaattttacagagatgagccagtttgaagaagctgaggcttacttggacgaagcaattcggatcacgagtgaattagaggatcatttttttgaagcccagcttttgcataacttcggccttcttcatgcgcaaagcggcaaatcagaagaagcggtttcgaaattagaagaggccttacagaacgaagagtatgcccgctccgcctattattatcattctgcctacctgctgatacgagagctgtttaagatcaaaaagaaagaacaggccttatcttattaccaagacgtgaaggaaaaattgactgctgagccgaatagaatatgtgaggcaaaaatagacattttatatgccatttatgcagaaggaggtcatgcggaaacgtttcacttatgcaaacaacatatggatgacttgttgtccgagaaagagtatgacagtgtaagagaactttccattttggctggcgaacggtatagggaacttgagctttacaaagaagctgcccactttttttatgaagcattacagattgaagaactgattaaacgaacggaggttatataaatgaaaagatttctgattggcgcaggcgtcgcagcggtaattttatcaggttggtttattgcagaccatcaaacccattcacaggaaatgaaagtcgctgagaaaatgattggataaatgaaaaacccccgcgggtgcgggggttcaatttaacgaaagaatcctaaaacggtttgtagttttaggattctttcatcttttcagcgtgattgaaaacccttgaagtctaggaagaacgagcattggagcgcagcgaatgtttggaattcgtgagcaccgaagcgcaggcctgacaacgaatgcgagggtttgtcgacacgctgaaacccccgcgggtgcgggggttttcttattacagcagcttcttccctagcagagattctacgagctctactgctgttttacccgttttgtttttgtgatcaaggatcgggttaacctcaacgaattcggctgaggtaatgatgcctgcgtcatacagcatttccatagccaaatggctctcccggtagctgatgccgccgacgacaggggttccgacacccggtgcgtcgttcggatcaagtccgtccagatcaaggctcagatggacgccatcacatgctgataaataatcaagggtttcttcaatgacctttgtcatgccaagacggtcgatttcgtgcattgtgtacaccttcatgccgctttccttaatgtacttgcgctccccttcatcaagtgaccgggcgccaatgatgacgacgttttccggtttgattttaggcgcgtagccttcaaggttaaccagtgactcgtggccaatgccgaggctgaccgcgagcggcatgccgtgaatattgcccgatggtgaagtttcaagtgtattcaaatcgccgtgcgcgtcataccagatgacgccgagattatcgtaatgcttcgctgtgcctgcaagcgtgccgatcgcaatactgtggtcaccgcccaggacaagcgggaattttttctcttcaatgactttgttgaccttttgcgcgagtttttcatttcccgccaaaacggaattcaggtttttcagttcctcgtcatttttgattttttcgcggttgatcggaatgtcaccgagatcctcaaccgtataccccatgtctgacagccgctcgatcagatgagcgtaccggatggcactcgggcccatatctactccgcgtcgtgcttgtcctaaatccattggcattccaataaccgaaatcgttttatccatctgtgattccacctcaacatttaagataatgtcctatgcgggttctaacaaagatgacttacggacaacgttttaaagctctagctgacgattcgcctgctggcgttttttaatgacgacatgataaatgatgtagcaaatgatcataaacggtacgccgcaatacagcgcgatacgctgctccggatcaaatgcgagactgatgagcacgaccgtatttaacgttagaccgatcagcggaagcaccgggtacagcggtgttttaaatttcaaatcttctatcttcccgccttcgcggatatatttgcgtctgaacatgatttgggaaagcgaaatcgtaatccagccgacctgtgcgctcatacccgccaaagataacagtaccatatagacagtttcagcctgcgcaaactttgtcagaagtgataggcaggccacagccatcgttacgattaacgagtacatcggtacaccgcgctgatttgtttttccgagcgctttgaaggcctgtccttcattggccattgcgtacagaatacgcgttgatgcgtataaacctgagttcgcaacagataacagtgcgattaaaataacaaagttcatgatatcagctgcatatgggattccgatttgctcaaatacggcaacaaatggactttccacgacacccgcctgtttccacggaatcatgccggcaatgacaatgattgaaagcacaaagaagacaagcgttctccatactgtctgtttgattgaccgtggaatcgttttttcagggtcttcactttctccggctgcaaccccgatcagctcagtcccctgaaacgcaaagttcacagtaatcatcgtaatcagcattgcctttatgccgttcggaaataacccgtcttcataaaaatgtgtcaaaaacggcgcctgctctccgcccttcagatcaatcaggccaaacatggcagctccgccgagaataataaataaaaggataatcaaaattttaatgcctgaaaaccagaattctgattctgcaaaggcttttgtggtgattgcatttaaaataaacatcagtgccgcaaagaccagacaccaaatccacacgtctatatgcggaaaccagcgttgcatcagctgccccgctgataaaaattcaatggcgcatgtaaccgcccagccgagccagtacagccagccgaacgcaaacccgaaggccgggctgataaattttgtcgcataggtctggaaggatcccgacacaggaaaggcgactgccagctctcctaagcagagcatcgtcaaaaacatgataaagccgcccactaaataggacagaaccgcgccgagcggtcccgcttggttaatggtaaacccggttccaaggaagaaaccggttccgatcactccgcccaatgaaatcatgaacaagtggcgcgatttcattgtccgctggagctgatttccgttatcttggtttgtattcacattctgcaccccttcagcaacttgtattggatctaagctggaacatctgcatggtgctatcccagtttgctgtccaaagagcctctatctatttaatataaaattcacttcttctcataaagatacattatactaaaatactgtagctgagcaaatagggagtgctgatttttctgttgtaaatttatacaaacgaagtgaatatcccgccatggtgcggatttatgcgttttgcagcacgtgcttaattttctctatcgcccaatccaaatcctctttggaaatgattaatggcggtgcaaaacgaatgactgtatcatgcgtttccttgcataaaagcccttcttccttcaaacgctcacaatacggacgtgccgcttcagtcaattccacaccgataaacagccctctgccgcgaacttctttaataaccgggttgtcaatgctctcaagctcgcttttaaagtattcgccaagctcaagagaacgatccgccagcttttcatcctccagcacttctaatgaagcgatagacactgcacatgcaagcgggtttccgccaaatgttgagccgtgtgagccagggttaaacacgcctaggatctcgcggtccgccgcaatgcatgagatcgggaacacaccgccgccaagcgctttgcccaagatatacatatccggaacaatgccgtcccagtcacaggcaaatgtcttgcctgtacgtccgagacccgtttgaatttcatccgcaataaacaagacattctcttccttacaaatcgccgccgcttcctgtaaaaatccttccggcggaatcacaatgcccgcttcgccttgaatcggttcaaacaagaatgccgctgtattcggcgtaatggcctgtcgaagcgcttccacatcgccgtaaggaatgagtttgattcccggaagcatcgggccgaatcctcgtttatattcctcttcagaagagagagataccgccagcatcgtgcggccgtggaagttcccgacacatgcgataatttccgcttgattgtcagctacgcccttcacttcatacgcccagcgtctcgccgctttcaccgcagattcaaccgcttcggctcctgtattcatcggcagaatcatctctttgcctgtcagtttggctgttttttcgtaaaacggcccaagctgatcgttatgaaacgcgcgtgacgtgagggtgattttatcagcctgatcctttaatgcctgaatgattttcgggtgtctgtgcccctggtttaccgcagaataagcactcagcatatccatatattcattgccttccgggtcctttacccaagcacccagcgcttcagaaataacaatcgggagcggatgataattgttggctccgtaatgagacgtctgatcaataatttctttggatttagataaagctggcatatttgaattcccccttgttttctgtttcaacatgttatcctgctttccctttatataaatgcaagttctgtgccaaatcaagaattcgtgtgttttctacaattttcgaggacaaggtgcaaaaacattctgatatttcgagcaaaaatttcagcaagtgcaaaattcttttgcataccctctccatttttttataaaatagaagcaatattaagaaaactgagggaggttcatacagtggtcaaagacagcgaattcctcacattggtttttcagagcattttagatgaaatcgatgttggcctgcacgtggtagacgagcatggaaacacaatcgtatataacaataaaatgatgcagattgaagatatggagaagcatgacgtcttgaataaaaacctgatggatgtgtttatgttttcaaagcagcaggacagcacactggtacaggctcttcaggaaggaaagacgattaaaaacgtcaaacagagctatttcaataataaaggccaggaaattacgacgatcaatcatacatatcccatcgtccaagacggcaaaatcaggggcgccgttgaaattgccaaggatgtgacaaagcttgaacggctgatcagggagaatatgaacaaaaaaggcagcacaacctatacgtttgacagtattctcggcaccagtccggccattcaagacgtcatcgaaaacgccaagcgggcaacccgtacgtcatcatctgtccttctcgcaggcgaaaccggcacaggaaaagaactgttcgcgcaaagtatccataatggaagcgatcgttctggcggcccgtttatttcgcaaaactgtgcggcattgccagacagccttgtggaaagcattttgtttgggacgaaaaaaggcgcgtttaccggcgctgtcgaccagcccggcctgtttgaacaagcccacggcgggacgctgctgttagatgaaatcaactcgctgaatctcagccttcaggcgaagctgctgcgcgcccttcaagaacggaaaatcaggcgcatcggttcgacaaaggatacaccgattgacgtacgtattattgccacgatgaatgaagacccaattgatgcaattgcaggcgaacgaatgcggaaggacttgtattacaggctgagtgtcgtcacactgatcatcccgccgctacgggagcgaaaagaagacattttgcttctcgcgtcggagttcatccagaaaaacaaccatctgttccaaatgaatgttgaacacatcagcgatgacgtgaagcaatttttcctttcttatgactggccgggaaatattcgcgagcttgagcatatgatcgaaggcgcaatgaatttcatgacggacgagcaaacgattacggcttcccatctgccctatcaataccgaatgaaaatcaagccggctgacattccagagcctgaaacaccaagacaccagccggccgcggacttaaaagaaaaaatggaaagcttcgaaaaatatgtgatagagaatgtgttaagaaaacacggccataacatctcgaaagctgctcaggagcttggcatcagcagacaaagcctccaatatcggctgaagaaattttctcactcgtctaacgaataatccggagcaggaagcctgatcagaaaaacagtgcctctgccgatttcacttttcacttcaatcgtcccattgtgattgtcgataatcgatttcgttatggcaaggcctaatcccgaacctccatatttccgggagcgggatgggtctgccctgtaaaatcggttaaataaatgcggcaaatgctccggcgcgatgcctgtgccattgtctgctatcatcagcatcacgccggaactgcctttttgcagagaaatagtgatggcaccggttctctcatttgtatactgcaccgcgttataaaccaaattcagaatgacctgtttcatcttatcccggtcaaacaccgctttagcatcatcctcaagcagcagctgcagccttctttcttttgcaagcagactgagctgcggctccatttcccttatgagcgcatcgagatttcctctcttcatttcaaagctcggcacccgatcaatttttgctaaaaacaacagatcctctatcagccgagtggctctcttcgactcttcatacatactattcagcgccctatctctctgctccggctgaagcgcggcgccacgcagcagcacttcgataaagccgtgtatggacgttaaaggcgttctcaattcatgtgaagcgtctgatacaaattgccggatgcgctccttcgcctctttttctgctttaaatgacgtttcaatccgctccagcatgcgattaaacgaaatagcgagcgtgtcgatttccatttgttttcgatatacaggaagccttttattcaaatttcctgcattgatttctcccatcatatgtaccatttgtgataacggtttaagcgtatgtctgaccacaggcaagaacgtgaaaagcccgagcaggagcgcaaccagcgagagcgtggaataaatgctgatttgccggagcagtacgtccttcagtggttctgttaaagtactcatttggatcacgcctgcttcttttccatcaatagtaatagcctgaaacacaatcagcacttcctcgccggattcatttttcgtgattttgtaatgcaaggccatcgtatcttttaatgcctcatcatatacactttttttcactgttggcggtgctcccgcatatggatcggtcgacaataccgtactgtcttttgttttcttatcgataaaaacaatggtcacgcccggatagataaaggcgggacggacagcaccatctgacttttccgagctgtcgggatggcttttgtatgttttaatattattccagatggttggctccgttgagttgatataactttgaatgctgacagctcggttttcatataagaggcgttttccaaacacatattgcatagcgccgacaaacaccaatagaagaacgagaatgcataatgaacggaataaaagctgaaagcgcagtgttttgaatcgttttttcattcaatatccacccgatagcccgcaccccgaaccgttcggatcacttcatgctttttgtcattcaatttttcccgcaaggaacgaatgtacacttcaacaatattctcttctccgtaaaaatcatacccccatactttatccagaatccttgctttactgagcacaaggccgtgattcagcaccaaaaactttaaaagctcgtattctgttgctgaaagcttgagcacctcttcctgatagcggatttctctgcgccgatcatcaattcgaaacggaccgagcgcgaattcttcaaacaggttgggaaagtgatcccgaattctcgcatagattcgcgccagcagctcttcaaagctgaagggtttgatcatataatcatcagcgccctctgtcagcgcttttacccgaacccccacctcatccttggccgtaagcataataaccgcggtatggccggtttttttcatcatcctcgatacttccagtccatccattccgggcatcatcacatccaagatggccacatgcggctgaaatgtctttacggtgttcatcgctgtcattccgtcagctgctgtcttcacttcaaagccttcattttcaagacccattgtcaaaaaatctaatatcgccggttcatcgtccacgagcaaaatcttgatgcctttcatcctattcatgctgtgctctctccttagttggcataaacctctgattagttttttcccttcccctcctattattcgtttttacctgaaaacaaactgaatcttccctaaaaatcagctgaattcagcaagttttcagccagccctcatttgattttcagcttcggcctatacaattgccttagttggtacagccaacaatgaaataaaggaggaatctcacatgaatatcactaaagttttatcaggagctgcactgggaacgattatttcaatcagttctttcacttctgctcacgccgctgtcattcaaaaggatgatacatcaacgaaggttgagacgaagcaacaggcttccatcacaatagcaaaggcaaaacaggttgctttgaacaaatgcaaaggtactgttcaatcagcccaaatgaagaaagtgaatggcacatacgtatatgttgtgaaagttctcggtgaggacgacaaacagcatacgatgaacgtcaactgcaacagcggcaaagttgtgaaacatgatgttcaaaagaaacaaagctatatcagcaaaacaaaagcccaatcgatcgctttgaaaaactgcaaaggtgcggttcaatcttctgagctgaagcaagaaaacggtgtttacgtttacgtcgtaaaagtaatgggtgaagacggaagccttcacacgttccatatcaatggagaaaacagcaaagtcgcaaaacacgagcaaaagaagcaagcacatctttctaaaacaaaagcgcatcaaatcgcactcaacaaatgcaaaggcgcagttcaatcttctgaactgaagaaagaaaacggcgcatacatctacgttgtcaaagtgcttggcgaagatggaagcactcatataatccatgtcaactgtgacagtggtaaaatcgtaaaacaagaagtgcaaaagaaaaacgcagccgttacaaaaacaaaagcacatcaaattgcactaaataaatgcaaaggcacagtgaaatctactgatttgaagaaagaaaacggcacattcgtttacgtgattaaaatcactgcccaaaaccacactgaacaaacagtgaaagtgaatgctgaaaacggaagcatttgcaaataaaataaactgcctgccagcagtaaaataactgaaattcaacgtataacaccagtcttgttttaacacaaagttctaagttcatgtctacctttttctaaatactcttttaaactgaacgtgcgtgacccgcgttcagttctttttctaaggaggacctacaaatgaatatgaaaatatgttctgcagctgctttaggagcgatcatttcaatcagttctttatcatccgcacacgcggctgttctgcataaagaagacactgctaaagttcaaacccagcagcaggcttctattacgctctctaaagcaaaaactgtcgctttaaagaactgcaaaggcgcagttcaatcagcacaaatgaagaaagcagatggcgtttatgtctatgtcattaaagtgcttggtgaggatggcaaaattcacacctttaacattaaccgcaacagcggaaaaatcgtcaagcatcacgttgaacataaacaagccgcgatcacaaaagcaaaagcacaaagcattgcgttgaacaaatgcaaaggtactgtcacatcttctgcattaaagaaagaaaatggcacctatgtgtacatcatcaccatcacagccagcaaccacacggtacaaaccattaaagtgaatgctgagaatggaggtatttgcagttaacagccatttgctgctgtttcacgtgtaacatccatcttgtatttttcttcatattcgatatatccttttcaactgaacgggcgtgacccccgttcagtttttttgcatatcaaaacagcctggcaaacgatgccagactgttttgattaacttcctaattggtctgcggaggacagcttgatgtctacagatttttcttttccgccgcggtaaaacttcaccttcacccggtcaccgacttttttctgataaagccgttttcgcaggtcaacaatatcatttactttgtatccgtcaaatcccgtgatgacatccagttccttcagccccgcttttccggcaggtgaaaaggcgtctacacccatcacaaccgctccattggtaacatgcttaggaagctttaatgtttcatcccaatgatagcttgcgatgtcgcttagcgatttcatctcaatcccaaggaacgggcgtttgacctttccgtatctctctaaatcctctatcacagggatcacgagcttagatggaatcgacaggccaatcccttcaaccgccgactcggcaattttcattgaattgatgccaatgaccttcccatccatatttaacaaagcaccgccgctgttcccagggttaatggccgcatctgtttgcaggacttctgcgttccagtcaggctgtccatcaccgtttgaatctactgggatcgccctctccgtacccgagatgacgccttgtgtgacagagccagcaaactcaaggcctaacgggttcccgatcgcaataaccggctccccagacttcactttatctgaatttccgaaatcggcgactgctttaattttatcgcttttcacccgtaaaacggccagatccatcagctggtcgctgccgacaagatcagctgatacacgtgagccgtctttcaagctgatttcaatttgggaagcgccttcgatgacatgatggttggtcacgacataagcggaatggtcatttttcttatagatgacgccagagccgctcccagcctcgccgctctctccccgtatatctgatttttggatgttcacaacaccgacaacggcgggcgacacattgctgacaatcttggtgaccgtattgttgacactgacattcaccgtcctgattgattcccggccgttattgttctgctgctgatctaaagcgcccgtatctagcccttcatttgaaaggtacggcatgataaacgccattaatacggcaccgacaatcacgccaatcaggcttgaaagaaaatatccttttttgcttctctttggctgttcaggagtagtatgttcttcctcacgttcgtaatccaccatattccatcctttccaagaacgttaatatggttatattgtgggttagaagctcctagaatagtcatgatttacatagaaaaattatacagcgcaaagcggagtggccttcttcggatcagtgtcgtataagtcaaatgtctcacccgtcacaaatcctttagaagccaatgtctgctgcacggacattcttgccagctccttcatgttgttgtcctggctcaaatgcgccaggtaaatacgagacgtctcatcgccaatgacatccgtcatcgccaaggcagcatcttcatttgaaacgtgcccgacgtcacttaaaatccgccgcttaatgctccatgggtatcttcccatttgcagcataccgacatcgtgattgctttcaaacacaaacacattcgctgaacggataatgcctttcattcggtcgctgacatatcccgtatctgtcattaacgcgagctttcggccgttataatggaacacataaaacatcggttccgccgcatcgtgggagacgccaaacgattcaacatcaagtccgccgaacgacttcaccgtctccatcggaaatacaaacttttgatcggtgtcaattttgccgatttgattctccatcgctttccaagtcttctcattcgcatagatcggaagcttgtactttctggcgacgacaccaaggcccttaatatggtcactatgctcatgcgtcacaaaaatgccgtctacatcatccagcttacgcccgatctgcgccatcagcccatccatggcttttccgctcaaaccggcgtccactaaaaatgcgtgatcctctgtttcgaggtaaaacgcatttcccgtactcccgctcgcaagtacgctaaattgcaagctcatgtttgtctcactccattattttcattgatctgtatctaaaatcgtactctccaaagcattcacagtaaaatactcttgtactgtctttttctcaccgttcacttttttctcgtactcgaccgtaattctccataccggcgccagcacctgcgtacttgtcagtggatattgtgctacatagccgaatttacagctcttcacagtgctgtattcttttaattgattttgatagtacaatagctcaaccgcatccatttcagtaattaagctttctttctggatttgcttgaaggtctcaagcgttgtctggtcgtacgacacaacctcgtttttaccgtttaagtgcaataccacttgcccgatcatattagcgggattatcggtcttttggtaaatataatggccttcgtacgtttggaagaaaataatttctttcttcgatttattaaccttccaaagcttatatttttcgccatcttgaatctttgaagaaacaagtgcctgagcatcgtcctcgatatccttctttgatagggctattggatttgcaaacttcattttcaggctcgttactttatgatcatcactaggcatgtccatcaaaggcttttgatccttcagcgcctcaatttcctccttggtgaaggctttttgatttgccgtgatccgatagccttctgtcgcttccttattcaagccttcatacgtgatatgatcggccttcatgtcatgctcgacatcatttttaatgacttcatattctttgccggtagcctgccatttttgaaaaaactgatagcctaagaaaatatctaaaatgaggaaggcaacgatgaagattgattttgtcttattccactccactgttagccccctccttcctcaataaatcctttgtaatcggcacaatttttccatttactttcatcgcccaaaccggttccagttcaacgagaggatcatcgttggttgatgttgataccaattgataagcaaggaagatctgatcaattttgtccgtatcataagcggtttgtttcgaaagcagcatcctcacttcgctgccgctcatgagctctgtttcacttgttttaatcggattcgttccgagactgtaattcggccgcttatagctgagaatatcatcattcgcccattgcaccgtaatcgccgatgtcgccccgaaaggtttggtggtgctgttaatgaccgggatctgatccataaagatatagaaactcagctgctggctgtcattgatactgaaaaattgatagtgatccgtccagcttccggtatcctcaaggtatttttggctctttttgattaattcacctgtttgataggatgtgctctgcaccaaattgcgctgttgaaattgcacctgtcgctggcttagattcacatctaaacggctgatcccatctgtcagcacatttctgttgttgtaattcgaatcttctcttacaatgctcggatcactaaacaaagcctgcttaaaggtatttgttttaatcgattctgtgacaaattcttttttgtccatcgtaagcggtttgttcggcagcaagaactctttctttgagccaatggagaacaaactgaacgccggcatatttgattgcctgtttttcaagtcgttcataatgttccggtagtttgctgactcaaccgtcacttcaagaatgagctgtttgctgtaagacaccaaatagattttcttgttcgcttttgtttcattgaacgggatcagaatatggtcaaacgaactgtattcaaacgactgattagaccatttaaacagcgtttggaaaatatcaatcggaatcgtatcgctgaattgcaagtcaagcttggcttcagaaccgcctattccataaaaccagcttttgaatccagccttgtcatactgatccgaaatatctttaattcctttcacatcccaatgtggcaagtcagaccaaatttcttcatagagggcattgtcatccactttgtaatgagcgccgtcatcatggataaacatgtcccttggccttaccgtttcagacagcttttgagtggttttttcgattttatgtttcacacgaacagtagactctgttgaggatgagccttcagaaaagtttggctggaacgtccatatcccccatgtaaaaacaagactgatgacgacgagtaccgtaagtaatatcgtttttatattttcacgcttcatcccaatcatcctcttgttcctctttatatggaagagtaaatgtaatcgtcgtgccttttccttctatgctgtccgcccaaatatctccgccgtgcgcctgtaccatttccttggcaatcgccaatcccagaccggtgccgccaagttttctcgttctcgctttatccaccctgtagaagcggtcaaagactttttcgacatcttttttcggaatgccgatcccttcatccttcacgctgatatagagaagttcttcctcttcattgacatcaatcgagaacgtgacatgtccgccttccggtgaatattttaaagcgttagaaataatattatcgagcacctgcgtaattttatcctggtcgatctcgacgtacagatctctgtccggcagattgcggataaactccacatgctgctcttttgtcatttcaaaacggtcaataataagcgacataaaccggacaatctgaatccattcccggttaaattgataatccttactgtcaaatttcgacagctgaagcagatcattgacaagccggatcatacgctctgtttcattttgtgtcaccattaagaagcgcggagcaatgtctttattttcccacgcgccttcagctaacgcttctaaatagctgcgcattgtcgtaagcggcgtccgcagctcatgtgatacattcgcaacgaattctctgcgttcctgatccattttctcttgttcggttacatcgtaaatgacagcgattaaaccatcaattttgccgtgttccctttgaatcacagagaaattcacgcgaagcaccgttaattcatcatcgcgctcaatttcaagcagcatagaatcctgctgctccactaaatcttcaaaagtataattctcttgaagccccagcaaactcgtaatcggcatttctaaggctgtttcacgtgaaacgttcaacagctccagcgccgggctgtttaagagaataatcgctccatttcggtttgtagcgattacgccgtctgtcatataggcaatgacagaggctagctttctgcgttctccttcagtcatcgcctgggcatcttcaagctctctcgttaagtggttaaacgttgtggccagctgcccaatttcatcatgcccgtactttttaaccttcctcgagaaattccctttcgcaagctccatcgcctgctttcgcatatctgaaagcggatgggtaatggttcttgccagaaaaataccgagaagagccgtcaaaacaagtgccaaacctgtgccggacgccaatatcgtgttgatcgtcttcatttgattaaagacatcttccatactcgcgacaacatagatcgcgccgacaacctcttggttttcagtcatgacgggcttcgcggaaataagaactctgattttgcttttcgggtcataatattttcttaaatacgactgtttggtagaaaaaattcttttgaaaatcagatcggtcgtttgtttccctgccacttcctcaccatacggctttgaagaaccgaccacttcatagcttttatctacaaagctaatttcccgaacctcatcacttttcgtgaagtcattcaaaatacggctgacgtcatcctttatgacggtgctgtcgttatcgctcttatattcttgttcgatataataagaaaggttgtcgattcgctgattcagcgattgttcataagagctgatcagcgacttctctacctgattgacaaaatacacaccaatgatttgcatggcaatgataatcaaaagtacataaatcaaggtaatcttaaattggatcgaccgaaaaaaaccaaccttattcatatggtcattagtcctgttctgggtttctcaagtaataacctacaccgcggcgtgtgacgatccaatttggatggctcgggttgtcctcgattttttcacgaagccggcggactgttacgtcaaccgttctgacatcgccgaagtaatcatagccccaaacggtttgaagcaaatgttcacgagtcatcacttgtccgatatgttttgctaaataatgaagcaattcgaactcacgatgagtcaattcgattgtttcgtctcgttttgatacaacgtacgcgtcagggaagatgacgagagagccgatatgaatctcgttagaggaaggctcttcctccgcaggcgctgttgtcagctggcggcgcaggttcgcttttacacgtgccaagagctcgcgtgtgctgaatggttttgtgacatagtcatcagcaccgatttcaagcccgataaccttgtcaatttctgaatccttagccgtcagcataatgattggcatatcgtatttctttctgacttcacggcatacttcaacgccgtctttattcgggagcataatatctaaaagaattaaatcaggctgaagctcttctaccatttcaacggcttcgtttccgtcgtgggcacagtgcacttcatagccttcttttcttaagttaaattccaatatatctgcaatcggtttttcatcatctactacaaggatctttttatccatcattttgattttcctcctgccgaatgacttcatttcatctatataacattcgtttcatcacttatggcccatgtaaagaatgggtccttgtctattataacggtttaaggtcaaaagataaaaaaaataaaggtttagaaaaaaaacacatgtttcacctttatcgccagttgtttatctattgtcatgctggtcaactttttttaaaaaagataactttattgaaacctcccttcaccggagtgcgtctttatcaatgacgtcttcttctttgaaccggccgcagggccggttctccctttttcttctattataacactcctcatgtttgcctttttcctaaaagaaaaaacgcacctacgattgcagatgcgtttggtaagtggctcgggacggaatcgaaccgccgacacacggattttcagtccgttgctctaccaactgagctaccgagccaaatgttttatttttctctactaagtaaagtaaaatggcggtccggacgggactcgaacccgcgacctcctgcgtgacaggcaggcattctaaccaactgaactaccggaccttacagtaattgcccggagagctgtcgtgtcagctctcacagacaaataaggaatttagcaataacgctaaagtaaatcaatgacccgtacgggattcgaacccgtgttaccgccgtgaaagggcggtgtcttaaccgcttgaccaacgggccttcacgaaatggtgagccatgaaggactcgaaccttcgaccctctgattaaaagtcagatgctctaccaactgagctaatggctcttaaagatgtcggaatttctatagagcaaacgacttagatctagttctcatcttgtactctattgaagcagtttccgtaacaacgagatttataatatcacgaacaaatagaagtggcaataacttttttggttttttttcatatttttttctcagaccaacttatatgcagctttcaaacaaaaaacaagccccttatataggggcttgcagacatattctatttagttcgcacggtacacactgcgaaggacatttgtttgtgagcggtctggaccgacagagaaaatagaaagcggaatgcctgtcagctgagacacacgctcaagataatggcgcgcattctccggaagctcgctcaagctcttcgcacctgtaatatcctcagtccagcccggcatttcttcatataccggctcacattcagcaagtgccttaagacttgctgggaattcttcaatgatttcgcctttatagcggtacgccacacagattttcaacgtttcaattcctgttaggacgtcaattgagttcagagaaagatctgtaattccactcacacggcgggcgtggcggacaacaacgctgtcaaaccagccgacacggcgcgggcggcctgttgttgttccatattcgcgtccgacttcacggatttgatcgccgatttcatctttcagctcagtcgggaaaggaccgtcgccgacacgagtcgtatatgcttttgatacaccgacaacgtgcttgattttggtcgggccgacaccagaaccgatcgtgacaccgccggcaaccgggttagatgacgtaacaaacgggtatgttccttggtcgatatcgagcataaccccttgtgcgccttcaaataatacacggcgcccttcatcaagagcatcgtttaagacaacagatgtatcgcaaacatactttttaatctgctgtccgtactcataatattcgtctaagatatcctcaagtttaaacccttctgtctcgtacattttctcgagaagacggtttttttcttcaagattgcgctcaagcttttccgcaaacgcgtcacggtctaacagatccgcgatgcgaattccgatgcgggctgctttatccatgtaagcagggccgattccttttttcgttgtgccgatcttgttagcccctttacgctcttcttccacttcatccaatttcaaatgatacggcaaaatgacgtgagctctgttgctgattctcaggttatctgtactcacgttgcgctcatgaagatacgcaagctctgtgactaatgctttcggatctacaaccattccgtttccgattacacacgttttatccttatagaaaattccagacgggattaagtgaagcttatatgtgattccgtcaaacttgattgtatgccctgcgttatttccgccttgataacgggcgatcacttctgcattttctgataggaaatctgtaattttaccttttccttcatcgccccattgcgtacctactacaactactgaagacatgtccgtgcacctccgttaacctttcaaaacgattctattcaaacaaatcaagtttatcagtgaagaaacagaaagtcaattgtaaatccgaacattaaattattgtaaatctatattcgttcgctttcattcgttttataagcgttttctcacggttttgtcataaaaagcttgcgaaactttcatcctttagcataagaaagaatcacttgcctgatatcccttttgaattcataaaaacgacccgccagccgtccgggtcctctatcgtcactcccccattgctccagtacgggttctctgattcgacctcttgatagcccatgtgctttagctttgaagtgatcgctgccagttcatctgcattcggcacataaaaaacaagaaggctgtcgggatggggaacgggggcagtgcttccaccttcatactgggtgaattccaaatgataatcggcatgaggaaggccgaacatgacaccgtcatacccgttatgctgtgaaaattctcctattcgtttcaaacacagtccctcttcgtaaaaacgaataatctcatcaagctggcccgtaggacgcgcaattcggatttgtgctgcgtgaaaagacgaaaaacgtttttccatattgttaccatctcctttttgcaccattttattaaaacgctttcagattttcatccgctgagcgaacggtatttcttccatctttcgaatgaaaaaaaccccaagagcagctcttggggcttatgcgccgggcggaactcctgcgtcatcaaaacgccgttccaggttgacgaatttgttgtattcttttacgaacgcaagagacacggttcctaccgggccgttacgctgtttggcgataataatttcgataatatttttattctcggtttctttgtcatagtagtcatcacgataaaggaacgcgacaatatccgcgtcctgctcgatacttcctgattcccggatatcagacatcatcggacgtttatcctgacgctgctcaacacccctggaaagctgagaaagcgcgataacagggacttgcagctccctggcaatcgacttcagttcacgggaaatttcagatacttcctgctgacggttgtcctttgaacgaccgcttccctgaatcaattgcaggtaatcgatcaaaatcatgcccagcccgctttcctgcttcaagcggcggcacttggcacggatttcactcactcgaatacccggtgtatcgtcgatgtaaatcccgctgttcgacaggcttcccattgccatcgtcagcttgccccaatcctcttcggtcaggttacctgtacggagattctgggcattgatatttccctcggcacagagcatacgcataacgagctgctctgcacccatctcaagactgaaaattgctacgctctcatcggtctttgtcgccacgttttgtgcgatgttcagggcaaaggctgttttccctactgacggacgggcagccacaatgatcaagtcgttgcgctggaaacccgcagtcatccggtcaagctccgtaaaccctgttggaattcccgtgatatcaccttttcgattgtgaagctgttcgatattatcataggtctggacaaggacgtccttaatattttggaaggcactcgtgtttttgcgctgtgccacttccataatcgttttttccgcttcactgagtaaatcctcgacctcatcctcacgggtatacccgtcttgagcaatcgttgtcgcagttctgattaatcggcgaagaatcgatttttcctcaacgattttcgcgtaatattctatgttagccgctgtcggcaccgagtttgcgatatctgtcaaatatgaaatgccgcctacttcttccagcaggtctgtgttcgcaagctctgatgttactgtcaccagatcaaccggttcacctcggtcaccgagcaccagcatcgcattatagattttttggtgggacattctatagaaatcatctggaatcaatacttctgaagccagtgttaaagcagacggctgtaaaaaaatagcgcctaacacggcttgttcggcttctatattttgcggaggaagccggtcattcagaaggtctgtcatgctaagcaccgtcctctcattaaaaaatctccaacctccattctaccatttctacagaaaaaaaatagaaaaattgtctgtttcctgtttttttcagttagcagattggatcgtttcggacagtaacaaggcgggaaaaatgcaataaaacatgagggaggaatgaaagatgataaagaaatatgcgattacgcctaatgttgatgcggacggctggtttattgaggtggagaatgtagcgccgacagctttgtatacgtctaaagacgccgctattgaaaaggccaaacaggtggctaaggaaaacagtccgtctaagcttgtaatttatgaccagtttaaaaatgtggaagaagaacactcattttaatgaatgaaagccttcgctgcagcgagggttttttagcggttatcggtttatttcatccattggatgcctatgtgcatcatcaaatctgccgctttttgatacagatcccactccccgatcgaagcaaatttccccatcagctcccgaagctttagcctcactgctatatattcttcgaaagtgacagctttttcagtgtctatttggtgttccttcagcatttgttttaataaagacaacggtgcgtgcataagaaccctccttacctcttttataacggtcattttccgattgctctattcctttgtgacatcttcttacatttcacatctgattcttgtacaatggacagaagagaggagggatcttttgtgagacctttgcaaatttctgctgaaactgcacaaaagcttgcagagtccttgaatctgccgcttgaacagatcatgcatatgcctcagcatattctgcttgccaaaatggctgaactgcaaaaagaggacaaatcatagccttcattcacatacttgcttacctgtttcgggataatatcatgtatatgttagaaaagaggagtaactgctttgccacatccacataataaaaaaatccaatcattttggctgatcaccggcattatctttatcgcctttaacttacggcctgcgatcacttcagtcggtccggtcatcagctctatccgggcagagctgcacatgtccaatggggcagccggttttttgaccgcactgccgctgctttcgtttgcagttctttctccgcttgcacctaagcttggacaacgcctcggaaatgagcgaactttatggctaggtctcgtgatactgcttatcggtgttttgactcgttctaccggctatactgccgctttgtttttcggaacggcacttatcggcgtcgggattgcgattggtaacgtacttttgccaagcttaatcaaacataaataccctgaaaagccagggatcatgatcagcctgtatacgacatcaatgaatatattcgcagctttagcatcgggtgtcagcgttcctttagcgacccagatgaatcgcggatggaaacaagcctttctcttatggggcgggctggctttgcttgcattgctgatctggatacctcagctgcgccatcgagatacggcaaaccagacaatgaagctgcaatccagttccatttgggcttccaaaatggcatggtatgtcaccatctttatgggcctgcaatcgtttttattttacagcagcatcgcttggtttcctgaaattctccgttcacacgggattgatacggcaacagccggatggatggtatcactcatgcaatttgcgagtctgccttccacttttctgacgccagttttagctgaccgtgtgaaacagcagcgcggtatcgttgcggcgctggcctcagtttatctgatcggcctctgcggattattagcgggcggaagccatacattgcttgccatctggatgatcattatcggtatcgggcaaggctccagcattagtctggcgctcactttgattggtctccgcagtgaaaatgcccaacaggccgctgcgctgtcaggcatgtctcagtcattcggctacctgctggcagcagtcgggccaatctttgtcggctatctctttgaccagacgcattcttggacgatgccgattgtgcttctcattgctgccctgatcgtaatgggagcagccggacagggagccggacgagatcgatacatttttcagtctgaaaaaaaaagaaattcagcataaaagcggggaaaatatctccgcttttttctttgaatatttatggtttattcataagtttttcatatttgttttttacaattagacaccataaagaggtgaaaaacgatgaaaaccaaacgattcgacgcagcccttatttttattttgctgggagcagcttttttgaatacgtatcacatttggcaggatgatgcagcgaaccagtactatttggcggctgtaaaaagcatgacgcaaagcttccataatttcttttatgcgtcatttgacccttctggatttgtgacagtagataagcctcctgtcgtgttatggattcaaacgattttcgcactgattttcggtgttcacacgtggagtgtcatcattccccaggctcttgccggagttggatctgtcttccttctctacagaatgattaagccgacttttggagttggagcggcccgcattgccgcacttgtcatggcactgacccctatcgcagtagctgtcagccggacaaacaatattgatagcatgctcgtttttaccatattgctcggttcagcttgcctgtttcgggcagtaaaacaaggcaagctggtttggctgctgatggcatttgccctgattgggctcgcctttaatatgaagatgatgcaagcgtttatggtattgcctgcatttgtgttattctacctggttgcatctcgggtttctctgaagaaaaaaatcgggcccctgcttctgtctcttgtccttctgacaggcctttcactctcatgggcgattgcagtggattcagcctcttcctcaagccggccttatgtaggaagcagccagaccaactcagtgctagaactggcctttggctacaacggcacagagcgtctgcttgggcaaactacgggcctagcaaagggtgatatgaatgctgctggcggagggaacatgcagaatcaagacaacatgcaagcgccaaatggcaacggttcatctttttctcagaacggaaatcaatcattcggaaaccattcacaggcgcctcagccgcctaacggacaaaccggcgctctcaatggaggcggaggcacacctcccacaggtggcaacgggcctggaaatggagggcctggcggcggaaaaagtatgaatatgttcggcaccggtgatcctggcccgcttcgtcttttccaatcagcactttccggccaaatcagctggatgcttccattctcattgatcggattactgggcgcaatcgtcagctggtaccgtgatcgccgcggacatgctgctaaaatgaaagaaacgctattctgggcggcttggcttgttcccgtggctggtttcttcagcatcgcaggattcttccaccagtattatttgattatgctggcaccgccgattgccgccctttctggtatcggatggtatacgatgcaccgcttatacaaaaataataaagactggtccagctatcttctgccggcagccgtcttgatcacagccgtgtttcagatgtatattctgagcgcttatacaagccaaatcggcagtgtatggatgtatgtcctggggctcttaggactgggcatcacccttgcacttctgatgcttaaacgcagccatccgttcagtaagctgctgaccatcatcagcttgtgcgttctgcttctcacaccagtttactggtcagcaacgccgcttctatacggtggtaacagcgtccttcctgaatctggcccgcagctcaaaggctcagcaaacggcgggaacatgttctcttcagaggtcgacagcgggctcctgtcctatctgagaaaacacaataccggcgaagaatacttatttgctactttgacaaccgtaacagctgcgccatacatcatttacgaaaatgaatctgttatggcaatgggcggatttaacggcacggatcccattctgactgtgtcggaactgaaaaaactgatcaaagaaggcaaagtgaaatacttccttctgtcagaaaacaactcaggcaacagcgaacttgtttcctggattaagaaaaacggaaaagaaataacatctgacgagtacagcggttcctccagcagcacgaacagcgtgcagggaatgcgaggaggacctggcggagaaagccagcaaactctttatctcgtggaataaaaaaaagaggcttggatgaatccaagcctcttttctattaagcttcttcttttacatgtacctttaacacagcctgcacttcaggatgcagcttcacaggcacgttcgtatatcctaatgcacgaatcccgtccggcagttcaagcttccgcttatctactttaatgttatggtctttttggagctgttcagtaatttgcttgcttgtcactgaaccaaataaacggccgccctcacctgattttgcgctaagctcaacagtcagtttttctaatgtctctttcaagctcttagcctgctcaagctcggcaatggcttcttttttctctttctgctgttgtccgtttagcgcgctgatgtttgaagcgttcgcttcaaccgcgaggccttttttaattagaaagttatgcgcataaccgtctgctacgtttttgacttcgcctttttttccttttccttttacatcttgtaagaaaataaccttcatctctgtacgcctccctcaaaatactcatctatggcgtgcttcagccgttccagcgcttcagaaactgaaatgccggacaactgagtcgccgcatttgttaaatgccctccgccttccagggcctccatgatgatctgaacatttacctcgccaagcgaccgcgcactgatacaaaccgtttgttcatcccgtctcgccaccgcaaatgaagcctcaacctcactcatcgacagcagtgaatcagcagcctgcgcaatcagcacttgatcgaagtattcctcttcattttcaggaagagaagcaatcgcaatgttatctttatagaggaccgtatgctggatcagcttcgcccgtttaatataggaatcaacggtttctttcaggaacttctgcaccagcaccgtgtcggcgccttttgcccttaaataagaagccgcatcaaaagtccgcgagcccgtgcggagagaaaagctctttgtatccactattataccagctaatagggctgttgcttcaatcatattgatttttaagcgcttcggctgatattcaagcagctctgtcaccaattccgctgtggaagaagcgtatggttccatataaacgagcagcggatctctgataaactcctcacctctgcggtgatggtcgatgaccacgatatgttcaattttattgaccagccgttcctccataacgagtgacggcttatgtgtatcaacgatcacaagcagtgtgtcatcattggaaatttccattgcttcttcaggcgtaataaatcttgaccacagttcttcatattttttgatttccccaatcaaacgctgcacacttgatccgatttgatttgggtcaatcacgataaaaccatctttgttatttgcctgagccacctttaaaatcccgatcgctgcgccgatagaatccatgtcggggaatttatgccccatgataatcacattgctgctttcggtgacgatttcctttaaggcgtgagaaatcacgcgggcccgcacccttgttcgtttctccattgggtttgttttaccgccgtaaaacttcaccttgccgtttggcagcttaatggctacctggtctccgccgcgtcccagtgctaagtccaagctggattgcgccaaatcgccaagttctttcagggaagagactgaagccccgacaccgacgcttaacgtcagcgctacaccgtcaaacgaggttttttcccgcacttcatcaagaatcgaaaacttcgaattttcgagttcagttaagatgtgttcattaagtacagcgataaagcgttctgaagacgtccttttcaagaagatcccgtactcctgcgcccaagcgttcagcaaagatgtcacctggctgttcatcgtgcttctcgtctggtcatccaatccttgtgtcacatcatcatagttatcaaggaaaatatatgccaggacggttctttcgttttcatatagcttttcaatctgaatttgttctgttacatcaaagaaatataacagacgctcatcccgtttgatgacaaccctaaacttgcggtcattcaatgtaaccgtttccgattccacctcttgtttgataagcggcactaccgattcacaagtatcgtaaagtgatctccccactaaagtgctttcattaaagcaagaggaaagaaacggatttgcccattctatataatattggtcattaaaaagcatgattccaatcggcatttccatcaatgcctcttcaccgacttttttcaacctgtaggacaacgtagaaatataagcatcaatctcttgtcgaataagagaatcagcacgcttaataaaaaacaaaataactgccagcagcagcacttcgacggttcctaatatccagttaaaataaaagctgatgaggattgtaataattgacagagcaatcaatgcatagatgggataccgaaacagcggtttttcataaaagcttggcatttctatcactccccaccatgtgagtaaaactcatgttcacttcaccttattccttatatgaaagcccatatctaaaacgcctaaaatgcgaatggctgccatgaagaccggatgcacaaacccaagtatgacagcaatcacagccgcagcctttggatattgtttcttatggcaatagaaaaagataaatgataaaccttggatgaaaatcagaaacccgagtataaactccccatttaaagcgatagagtacagcatttggcctttttctaaaggcaaaaatgaaagcatgacaataatcaaatacagtactacaacactttgcggaaacttcaactctctaaaaggctttagattaggaatatcgggggagaatcgccttaagagcggcttagcgataaggtaactgaggaaagaaaaaataactcctaccatcacaatagctgttggaaaaagatattgaacgatacccaattgttcttccatcagttttaattgcttctcaaactgtccagcattgcccgactgcttcgctacagtttctaccatatcaagagattgccggtattgtgtcatcgcctcatcaatgatattgatacccaaaaactgaatgcttatcacaaaatagaagacaatactaagcatataaataagagcgcccgaaataatggcgtgcccgggctctttccttttgaaaaaatgtcccatggcaatgccggcgcaagctgacataaaagctacaataagcccgttaaaggacccgacaataaaaacaaccggaagactgacagcgcccatccatatccctagcttcaatccatgtctgatcgtatacaagatcattggcagcggcagtgcaaataacagaattgttccaatcacaggaacataaacgaccagaagcgtgatgatcgcaaacagactgattaaaatagcaccttccattaaagctctcgtttgtttcacttagtcacctcgtatcatcctgaacatacgaatagaaaagagcagcataaacgactgctctttttcatcgctgcaacatacgttgcaccgaatgtttttatatcatctctaaattttacttttatattttaacataagtccaaatcgcaagtaaaatgacgctaatgtttcatgtgaaacataaaaaatgaaaagacattctttgaaaagaatgcccatcacaattaatgtttatcatccataaagccagaagattccttgtttttctttttcgtttttctgacatacataaaaattaagatcaccagtaaaagggttgttgcttgcagaacgccgctgctaaacaagaaaaagttctttatcatgtcccacattgtgtttcacctctttgtgcatgttctcaacccgtatcctatataaggtgaatttccctttttataaacttcaaaacatcatgaacaacattgagcgttgggcatatgctgatatggaatctgatcgataaaggagaattttcacatggatgaacgcagaacattggcttggcatgaaacattagaaatgcacgagctggttgcttttcaatcaaacggactcattaaactgaagaaaatgataagagaagtaaaagaccctcagctcagacagctttataacgtgtctattcagagcgttgagcaaaatttgagagagcttcttccgttctttccacaggctccgcacagagaagatgaggaagaagaacgcgcagataacccattttacagcggtgacctgctcggttttgccaaaacatctgtccgcagctatgccatcgcaattacagaaacagcaacacctcaattaagaaacgtactggtcaaacagctgaatgctgccatccagctgcacgcccaagtttatcgatacatgtatcagcatggatattatccgtcttacaacctttctgaactgttgaaaaacgatgtcagaaacgccaacagagccatttcaatgaaataaaacaagcagcaaaggagttccctttgctgctatttctgctgatccttcactaagccgttcgaacgataagattccagcacgtctctgttggattctccccattctttcatttgcaaaacaatcggttcaagcgttcgcccgaattctgtcagagagtactcaaccttgggcggcacctgttgataaacctcacgatgcacgatgccgtccgcttccagctccctcagctgaagagtaagcattctttgagtaatactcgggcagattcgccgaaactcattaaatcgtttcttgccatctatcatgtgataaaaaagaattcctttccactttccgccaatgacatctagagtaaattcaactggacagccttctttgttcgggtatatattcttttttccactcattcttgaccctccaatagtaccttttttgatactacattacattttgcaactaagctacccagtattttacacaccttttctccttagctcaaagaaaatgcttcttattcacatcaatttttaagggtttgcatgattacacctgcagcaagacgtgttaaactatataaagattacactacttaaaaaaaggataggagctatcatggaaaagatacttattttcggacaccaaaacccagacacagatacgatttgttctgcgattgcttatgctgatttgaaaaacaaactcggcttcaatgctgagcctgtccgtctcggacaagtcaacggcgaaacacaatacgcgcttgactatttcaaacaagaaagcccgcgtcttgttgaaacagctgcaaacgaagtaaacggcgttatcctggttgaccataacgaacgccagcaaagcatcaaagacattgaagaggttcaggttttagaggttatcgaccatcaccgcatcgctaactttgaaacagctgagccgctttactatcgtgctgagcctgtaggctgtacggctaccatcttaaacaaaatgtacaaagagaataacgtgaaaatcgagaaagaaattgccggccttatgctgtctgcgatcatttctgattccctgttatttaaatctccaacttgcacagaccaagacgtagcggcagcaaaagagcttgcggagatcgctggcgtagatgctgaagaatacggcttgaacatgctgaaagcaggcgctgatctaagcaaaaaaacagtggaagagctcatttctcttgatgcgaaagaatttacactcggcagcaagaaagtcgaaatcgcacaagtaaacacagtggacattgaagatgtgaaaaaacgccaagctgaattagaagctgtgatctcaaaagttgtggctgagaagaatcttgatctgttccttctcgttatcacagatatcttagaaaatgattcacttgctcttgcaatcggtaacgaagcagcgaaagtggaaaaagcgttcaacgttactttagaaaacaacacagccctcttaaaaggtgttgtttcccgtaaaaaacaagtcgttcctgtcttaacagacgcaatggctgaataagcaaaaagcatcccgcatcgggatgctttttcttattcacccagcttctcaatttgtcccatcacatcagtaatttgctttgcgttttggaccaggtctgactgctccaattctttaagcgataccttgccttcctcggcttgtttcaacacctcttcagcgcttttctgcaaggtttcgttatgctcctgaatggttcgatgaatctccgctgcggcatcaggcggcgttaattcattaaaatcagcggcatccttctgaatcgattcaagctgcgcttcaagtttttctttcgcctcggtgtcatttacagctttctcagccaattcaggcgcttcctctgcaaatgtcttcaccttctccacataccccgctgcttcactcgtatagttcaatccgtcgttcacctgatcaagcatgccgcatccgcctgcactcaaaagtcccactccggcaagtactgtcaaaatgatcttcatcttcagccccctcatcgtttctttttcattttttcttttaagatcggaatcaatttctctttcgctaacggcagccctttcctcaccaattcacgcttcagccactttttcagcttagacattctgatgctcctctccctttttgataaaaatgaaaaaactccaccaatttggtgaagttcctgaaacaaaaagaccttcaccaaatcagatttggcaaaggtctcgctaacaaatgagattgccagcaaagccgaggacaacttgtcccgtaatgacgactttactgtgaaagctactcccctttggagtgttcatttttattactttcattctaaagcaccgatctgttccagtcaaattcctgccgtttatataaaagcgcgctgtggtatttaaaatttgaatggtttttccatcaggagatcatgctatgacagaggaggttttcatcatgagtcaagagcgcgtgaaacggcctgggcataccagatggtacatatcttcgttacttagcggcattattattcttaattattttgaccgagtggccatctcggtagcggcccctgcgatacaagattcgtttcaccttactgcaactgaactcggcatcgtgttttccatttacacctattcctatacactgatgcagctgcctgtcggaagtttgctggaccgttttggggtcgcatgggtcacgagggttggaatgacaatatggagctttttaacgatccttcttgcttttttgcaaggaaaattgctgttgtatctgttccggtttctcattgggctgacgagcgcctctgcgttccctgctgcctctaaagcaaccgctctctggtttcctccaagtgagcggggattggcaaactcactgttcgattcggccgccaagttttcaaatgtaatcggcgcgccattggtcgcctttcttgtcacaacatttgactggcgtgtcgcttttttgacgattggatgcatcaatgtgctgtttacgatctttttctggcagtattatgaacagcctgaacggcacaaacgtatttctaaaagtgaactaaactatattcaaaaacacaatgccattacaacagagcaaatcccttacaaaacgggcccgcttttaaaaaagcttttcaccaatcggaaagtatggggcttaatgatcggatttacagggtacgggtatacattcaacctgctgctcacctggcttccgactttctttaaacatacatacggtatggatctcatgtcgtccggtttatttacggcagtgccgtggctgatctcaaccatttccggaattgccgtcggcggctggctcgtcgattattttattaagaaaggctatcctaacaccaaggtgtaccgaaccgtaatcatagtcggaatgagctttggctttttctttttaggctccattctgacgaacaatattaccgtagccattatttgcatttccatcggactcgccggaatttcagcaaccgctccggtcggctggtccatctccgcagaactcgcgccgatcggttccgtatccatgctgagctccatggtgaatctcgcaaacaacctgttcggaggcattattgctgcgtcactgacagggtatttgtttgatgtgacaggctcctttacactcagctttctggtagctggttttgtgctgttgctgggattggttttttatgtgtttgtattaggggatgtaaaacgaattaaactggaatgaagagtgcttgctgaaaagcactcttttctttgaatccgccaggtgttattttctttctcccaacattcactaggctgtcttcggacgaaaacaccaccattttatccttgactccaaccaaaggtaaggcctcatagtgaaagaagaaaggaggagtcagatggtgaaattaacagtaaaagaactatccaatattgcgaatgtcacaatcaaaacgctttatcattaccacaaaatcggcttgctagccccaaaggaaataagcgaagccggatatcggtactatggtgctgaagaactaaaaagactgcaggaaatccttttttacaaagaattagatattcctttgtcagaaatcaaaacattactaaaagaggatgctgaaagaacaagtacattagaaaaacaaaaaaagctgtttgaaaagaaaattgaaaagtatcagcgtctcattcaaacagtcaacacatctttagaatacacgagaaaaggcgaaaacatggatcataaggtaatgtttaaaggatttgaaagcgctgaagaatggaaacaatctttagcagaacaaaatgggtatttaaaagagcgttacgattttgaattggatacacatacaatcaatgtcgatgaaatgaacaaaatggcaatagaggctaaacattttcttgataggatggctgattttttaagaaacggtgtaacgtatcatgacccttccgtgcaagagcatgtcatgaatcatcttaagttcctaaatcagaacgggcatccgacaagtaaagaagattacgtaaaacaaacacgtttttttatgcaagatgatttccatagaggaatgttagaagagcagcaaaccggtttatcttattatttggttgtcgttgcagaacacctgtagtgttttgtcaccctttatagggtgacagccatcaggattacgagacagcaccgccaacaatcgaaacattctgccggtcaacggcaaaacgccgtccgttccattttaatacggtttgaacatatcccaatgagtcggcgttataccttcccgctatccgctggtacgccaataattcgtatacgccgtctctgtcaaaatcaaccggatacaaacccgataaaggattcacccatccttctatcggcatttttaacacaccttggctgttataaatctcattcaaatattccctgcctttgtaagtaaggtcgaggatatacgtttcgttttgctgatgactgatgacgctcgctttatattgattttgatacctcacactgtactttaattcatcattcaatacatctgaattgaaaattcgccggaactgcctgtttagataggcaaacacgtatgcataaatagcaccgccgcttccccctgtatctattaccaccgccacatcctcaatcttgtcgcctgtcatatcccccagaaaaagtgacggattgtatcccatattgttttgaagctgaatctgctgctcctgatgggttctgccatcacagatcaccaatgtgatatttctccataacaggctgccgggcatttgatttccagttagaaagacctcatcaataacgccgtctcccgttacatcgccgcgagtagatgcaatgattgcacgtgaggagacaggctgccgaaatacgtatggatgttgaacaagtcctctgctttcataaaaccaataaggagccattctgatgtcatacacattcaattgtgtcaccttccctaatcagctgaatgaatcattatatgcaggaatggcacatcaaagacatatcttacacaccaattaaatccgtaccataagagttatcgattacacaaagccactcgccttgcgcattcttcttaaatacataggtcgcccttctttccatcgcatactcggagtcctttttatccgaatcaagcagtgtctgagaaaggacgagtaccgtgtcacctgcttctaacaggatcatttccccttgtttcgggacaatatgatgattgaaatagttcacaatcgtaataaacgcttttttgatttcttctttgcctcgcgcgatcatgcccggcttcacgactaaaacggcatcttccgaataataattcatcagtgtatcaaaatcttcattttggattgccaaatcacacgcagagatgatgtctttcaattgctgttccaaatgaattcccccaatcatcatgattggatatattatacatcgctagaccactgaaaccttgaaaacaaaatgaaaagtatccttttttcctatataatcaaatagatatatttaacaaagtacccaagtgaaggggtgaacattattgtctgcggaagtaacgttacatgacaatatacattatgatttaagtgcggattgccagcactgttttggcctgtgctgtgtcgccttgccttatgcgaagtcggcagattttgcttttgataaagacgggggcacgccttgccgcaacttacaatcaaactatcaatgttctatacataaagatctcagagaaaaaggatttcgaggctgctctgcatatgaatgctttggcgccggccaaaaagtatcccaaatcacttatgagggaaaggattggcgaaacagccccgaaacggccaaccagatgtttgacgtttttcctatcatgcagcagctgcacgaaatgctctggtatttacatgaagctctttctatagatatagccaagccgattcatcctgaactgagaaccagtttcgaaaaaatagaaaggctcaccaggctcagcaaagaacgcttgctgacactgcaggtggacgagcatcgagctgaggtcaatgaatggctgttaaaaacgagtgaactggtgcgtgcccaagcccgccatccaaaactcccgaaaaaggtcagccggggaagtgtcctgatcggcgcgaaactgaaagggcttgatctgcgaggagcaaatctaagaggggcgctgctcatagccgccgatctgagatttgccgatttgagaatgacagactttatcggtgcagatatgagagacgctgatctcagcggcgccgacctgaccgggagcatctttctgacacaggcacaggtgaacgccgccaacggcgattcgaaaacaaagctgccgctgtctgtacgaacccctgcccattggaaataaaaaaggacccgctaacggtccttttttactgatcaattcaatcctttttcgttccttttatccggcattttcacacttcttgccaagtatcccgacagccataacgcaaccagcagcatgaaggtgatcataccgacgacgcccagccagtgaaaagcagaccagaatagccctccgactgttccgcaaacacttgaaccggcgtaataaaagaacaaatacagcgatgaagcctgtgctttgttatgaagggctctcctgcccacccaactgctggcaactgaatgtccgccgaaaaaaccgaatgtaaagagggcaatccccagaattttcactgccagcatactgtttatcgtgaataaagcacctgcaatgacgatgaaaatattcatcaccagtatttttggatagccatatcgatcaaccattcttccaatgaaagacgagctgaaaatgcctacaatcatcacaataaatatccagctggcaaatgctttattaagcgaatacggcgggcccaacagcacatacacaatgtaattaaacaaggcaacattgcttccgagcagcaaaaaaccaatgagaaacaaactgaatagttttcggtccttcaagtggccaatcagagacattcccaatttcccgagcttcaattttcttggcgtaaaatgcctggatggcggcaaatttataaaaaatataacactagcaatcaaactaatgacaccaattgatcccatcgccatatgccaattcaagtactcgctcaggagcccggaaacgatccttccgaaaacggcgccgattgcatttccgctgatatacagccccatcgccgacccaagacttccgggttcaatttcttccccgagataagccatcgcaatcgacggaaggcctgcgagcgcaacgccttgaatggttctcaatacgagcagcgtatgaaagtttggactaaaggccgatgccagacagagaaccgatgcggccagcatggaaatacccataatcggcttgcgcccccacacctcggataatgaaccaaagacaagcatgctcacagctaacagcattgtggtaacagataaagaaagactcgccgcagtaggcgttacatgaaattcccgcgtgaattcctccatgagcggctgtacgcaatatagaatcgcaaatgtattgaaacccgcagcgaagaaagcaaacgtaatttttcgaaaaaccggtgtgcctttttgaatgtatgtcatcgggactttatcggtccctcatcatgttgtggagcactgccattcataaacaaccatcctttatttcttccgaattcaaacatcctcgagtctgtttatattactatcttagcaccgttgatatatgttgtataatgcatataaaatatcattttcatgcttatatgtaataaaggagggatgataattggaatgggaacaacttgaatattttcaaacactggcccggatgcagcacgtcacgaaagccgcaaaaagcctctccatcacacagcctgcgctttcacgctctatcgccaggctggaaaatcatttgggcgtcccgctatttgacaggcaaggacgatccatcagcttaaatcaatacggacacatttttttgcggcgggttcaggcgatgatgaaggagtacaccgaaggaaaagaagaaatccaagccttattaaagccagaccaaggcgtagtctctctcggttttttacatacattaggcaccacgctcgtgcccgatctcatcggctcctttcagcaggaataccccaacattgccttccagctgaagcaaaaccactcttattggctgcttgaacgattaaaatccggagatctggacctctgtctcctcgcttcgattaagcctgaaaatccgatccaatggatcaagctgtggagtgaagaactctttgtatttgtgccaaatgatcatccattagccagtcgcgaaagcattaccctgaatgagattgccggggagcgttttattttattgaaaaagggctatgcgcttcggatgacggtcgatgagctgtttgagaaggccgatatacagccgaacattatgtttgaaggagaagaagcagctactgccgcaggttttgtggcagccggactgggcatatctattctcccagacctgaaaggcttagaccaaagcaaaatcaccaaaatccgcgtcagctggccggaatgtcagcgtgtcataggaattgcctggataaaaggcaggtttttatcaccggttgctgagacctttaaacaatatgtgatcagccatttttctgagtagggaggattcaaacatgaatgtcaaaaaaatcacgtcagaacaggatttacatacagcgtttgaaatcagaaaggcagtatttgtagaggaacaaggctgtcccatttcggatgaattcgatgagttcgatacactccacggtgactgccagcacatcctagcttatcatcagaatgtacctgttggcactgcacgtgtccgtatcgttggccacgcggggaaactggaacgaatctgcattctgaagtcttaccgcaaattcggtttgggaaaagtgatcgtcgatgcattagaacgtattgtgaaagaacaaggcatttctgccttcaaactgcacggccagacacaggcggcaggcttttatgaaaagctcggctatcagactgcatcagaagaatttatgctggacggcattccgcatgtactgatgacaaaacaagacgattctgctttatagattgttcacaaatttgtcacttatgagcatgaacagttcattggtatactaatcaccgattatggagagaaggaatgattgtatgccagcaaataaaaaagagggtcttatatttggcgtgatgatgtgttttggaatggtctgcgtcatgtcgatttacaatgccatcatcaacggagccattcaggatttttcactggtgaccgtttttgaaatggccatcggttttatggtcgccctcctgttcgatttactgttagtgggccccctcgccaagaagattgcattccgcatgccgttcgacaagactaaaaaaatttatgtcatccttgccatgtcaacttgtatggtgattggcatggtactttgtatgtctgtgttcggtttagtgacagcggttctggcaaatgggctgaacggggacagcctcttcagtgcttaccttatgatggtgttgaaaaatttcatcctggcctatccattgcaattactgattatgggcccattagtcagagggattttcatgaaatttgtaaaaccaaagctcaaaactgcaatttaaatagaaaaggagtgagcctgacactcactccttttgctcatgaatcgaatgtaaaacaagctccgcaaaagcctctgcggcaggcagctgccattttttctttttgagtaaatcggatcaaggactgcaccatgctgaagaactttcagcttatgtttttcacttccattaatccctataccttaccaaatagtttttatacaattcttcgttataaagaatttcttcgccatgtgaagagcaaatgagcgttggtttgatttgatctatgattgagccgctatcgatgttctcatttatatcaacactgaatcttcttataggtgggtgtaaatcctccttacttgtgataaaaaggtcgcccgttaatagcgtacgatcgattttatgatcatacacgacatgccccggcgaatggccaggtgttaaatagtatttcagaggcaggtgagcaagcgtttgctccgtcagcggctggacaatatgggctacccctgtgttctccacttcatttttgttcggatatggctcttccccattgatgtattttagttctttctggtgcgcaaaaatcggaatatcaaatctcactaaccattttgatgcacctccgatatgatcactgtggccatgggtaagcaaaatggcttttggattgccgatcgctaacgctgccctaatttgagcatcagcaaaacgttctattcccgtatcaacaatatatacatcatcaccatctttgataaaccaggtatgaaccggaatccgaagaggcacatcaagctcaaattcacattgatagacatgctctgataattgtctcaagttcacgcaaaccactccctttggagatttttgatagtttaaaagaaaaatagaagtgaacggactattttcaaggcagattatcttgaaaatggtcccacactccagcggaccggtattcttgaggaggagacgccgattttcgccagcatcagctcgacttgttaacattgtccattaataatccctcttgttccccttcttcacatactcccaatcacgttctatattcttcctcactctatgaaggagtgcagaaatggtttccttttcctctgaagtaaaaccggacaaggccacttccgtggaatgttctccttctcttcttaacaatggatatacctttttccctttctcagtcgggaacagtttttttatttttttattttgctcatctggcagtttttgaataaatccctgcatttccagcttcttaatggcccgcgcggccgttgtccggtccacctttatcatttccgccaatttttcttgaataattcctggattctcgtatatacgtacgagatagaggtactgccctcttgttaagtccaaatctttaaattcgatgttgcttatggaatccaacgctcttgctatcatgccgatctcacgcaaaatatcattcattcctaaaacccctcacgtatttttgttgcaattacaacaaaaatgttttaaccttactattataagaccacatgcgtgctgtacagtccagactaatatcagaaaaggattgattcataatgaatataaaaagaataacaactgaagctgatttacatgaagctttgaatattagaaagacggttttcattgaggagcaacatgtatcggaatccgaagagttcgatgaatttgatacgctccaggaacaatgccagcatgtcttggtatatcatgagaatcagcctgtcggcacgggccgtgtgcgcatcgttgaccatacagcaaagctggaaagaatctgcatcctaaaaccttaccgtaagtatggattgggaaaagtcatcgtaagcgggttagaagaaatcataaaagaaaaaggactgactgcatgtaagctgcatggtcaaacacaagcagcaggcttttatcaaaaactgggctaccagatttcttcacaggaatttatggaagacggcatccctcacgtcctgatgacaaaagacatatcgcggatttaacatgaaatatattttttacggattaggaatacttatattaagtttgggcatttccttaaccatacaatcaggactgggcacatcacccttcgatgcccttttggtgggtctgtcaaaagaaatcggtcttaccgtaggaagctgggaggtccttatttctgtgatcctcttaatctgcaacgctatattaacgagaaaaaaacctattttgctgggcttgattacagcattcattactggaataggcattgacctatggttgtttgttgtaaaaaacaccctctatctaaacgcgttgttaagcaaactgatttgtttcggaattggtttggtgctcatcggtcttggaacagccatctatcttcagacgaaattcgcatcaacgcccatcgatcatttaacacttattatccgagatctctccaaaagaacaatcttgttttcaagaacattggtatacgctcttttcttagtattagccatcatctttaaaggccctatcggcatcggaaccctattaaccgtctgtttgggaggaatgatccttcacgtttttatgcctattgtggaaaaacaattcttatcaaaaaaaagaaggggttaaaaaacctcttctttgaaaaaacgaaacgcaaaacaagctacgtttcgttcaataattttatgataaattaaaatttatagtaccaaaaaatcgcaatttcatttgctgttggaaggttggaataaagcatcgtatcaactgcacctattataaagtgatgtttggcataaaaacgacaagctgaaacattaatatcttgtgtttcaagcataagaccaaaaaagcgattctcctttgcccactcaatcgctttatgtaataatgctgttccaacgcctttttgtctatagtcttttgcaacggcaatgtcctctattagtgcatacccattccagttagaacgaatcttaatccggccgatgcagttgttttcaacataatataaaaaaaccgcttttccctcttcttcaacataactaacatccatttcatcatcttcatattgtttaaaataaggtttagaaaatcgttcctcagtatatgtccaaacaccgttttcaaaagcaggtatcattctcccaaaaacaacgaaaggttcatttggtttattgaaatctttcaaattcatttgagtcattttcttgatcatatcaatcccctcctaaacgagattatattagcatactcgtttcgatcgataacagcttccaaaagggcactctttaaaagaacagcatccattaccttttatataagcgatttttctatttcactgtcttaatggggtatttcaacagaggcttgtggtacagtaaaaaggaatagaaacaagagaaaagaagatgaacctatgcccactaacaataaactcaatgagaaatatcatacttccttcaactcgcccacaaccctgttgactagtatccgtggagagaggaagctttgacacagcttctgccattgatgacatctctattgaagtatccaaaggacaaccaaggatcgctatttgactttttcaagaagaaagtagagtgaataaaggagtgattgagtatgttaacaagagaagatatctttaaacacgtcaaagaaaaatacggtacatcgcctgattacccgtgggagaaatacccaaactatgcttctttgagacatacatcaaacaaaaaatggtacggtcttatcatgaatgttctcccagaaaaattaggcttggatggtcatggcgaaatagatattctaaatctaaaatgtccccctgacataagtgatagcttaagaaacggggaaaatatcttacccggatatcatatggataaggaacattggatttcaattgttttagaacggacagatccagaaggcgaaatctataacttaatcgagcagagctttcatttaaccaagtgaagataaagagtgttccggctaatcaagctgcgaagagtagtgggcactttcattttaggatactgttcttcactcagtccataaacgcaacttagtctatctggtgcgagagtgggagaagaatttctaccaacttcttatggaaaaggatgaatagttatgacaaataacttaaaacagagaagaatcattttagatttagcagttactttagatggttttattgaagggaaaaatggagaagttgattggtgcattatggaccctgatatggggtttactgatttcttaaatcaaattgatactattttatatggcagaaaaagctacgatttatggggacaatatattccaaaagatgaagaccctgatacagaaaaggaaatttgggaattggttcatagtaaaaagaaatatgttttttccagaacacaaaatgagattgataatcaagccatatttataaatgataatattcttgaagaaggaaataaattgaagaaaaagtctggcaaagacatctggctatatggtggagcgagtctcattacaacttttataaatttggggcttgttgatgaatttagattatctattcaccctgttgttttgggagaaggaaaaccgttgtttattgatgtaaaacagaggataaatttaaaaatggtgaatacaagaacattttcctctggcgttgtgcaaatcgtttatcattggaatggctaacattgtaaagtaacactcgacagtaatccttcttattgaactaaaggggaatccataaataatgggttccccttaatatactatggaactatcaatatcaaattttctgtaataaaagaggattgaaaaggacggtgtctcctccattaacatcattaagcattatagtatattttcttctccctcttttaagtaaatcggctaagttttgtgtttataaaaaaacgaaagaaggtgatcctatgcccaataacaataaatccaatagattaatcgctgagaagtctacttattttacttcaacatgctcataaccctgtggactggttcccttggggagaagaagcatatgaaaaagcgaaacgcgaaaacaagcctgttctcgtatctattgggtatagctaacgatggctaatctaaagaacatgctattgatgccatgtttattcattttacaaaaaaggatcaaccttgaattactttcacaagattgatcctttcactcatttagccatgtctccgcgaacgtttatatacattcaagattactagccaacaaataacaatgattcctgcaaaaagtatgagcatattgctatacaaataggtagagtgatcaacgtcaataggcagcagcctatgatctaggaagccgatagataataaaccgcctacaatcgcaatacccgttccctctgataaaaagctcgtgaaattaagcaaactcattccagcgcccgcttccttttctttcaaactgctagacacaactgtagatataactgtttttgtgaaagatagccccccaaaaacaaaaattactataattgtcatgatccatggtgctgcatctataaaaaaggcagcgattaaaaagccggaagaaagcaatgcacttccaatagttagtacatacaaggaacctttccgatcaacaagcaatcccccaatgtaaccaaagatgatgacactcattgttccggggaaaataatgccgcttccaattgctgcagtacttaaatggtgaacatctttcatcatgtaaggaaccatagagacaaatcctgctactgtaccaaatattagtcctccgcaaagggttccaatcacaaaaaagacgtttttccctaattcagggtcaacaaaagggtcctgagctttcctaatgtgttgcacaaatatgaagaaagcaaggatactgatgatcagaaaagaaaatctataagatgttgtaaacagcataaaaaatacgatacctgcagacatcaatataatccctgccatatcaatgtgtcctcttattctctcttcctttttcaacaattttataaggaatggaacggtgataattgttgcagttggaataagcagcaaatacgaccaatggatataatgagcaaccattccgccaatagctggcccaacaccttctcccattgctaccagggacccgatcaggccaaatgctttccccctgttctcttttggaatatagcgcgcaacgacaaccatcacaagagctgggaatgcggctgcaccaattccttgaataaatcgggctagaatgagaataggaaagaaagagtgtccaacaaatccaatgatcgaccctaagccatttaccataatcccaaatagaagcagatttttgatgcccagctggtctgatagctttccatatagagctgttccaatggagaaggttaacataaaggctgtattcacccagtttgcacttgctggcagtttattaaactcgttggcaatatcaggtaatgagacgttcagaaccatttcatttaatacgctgaaaaatgatagaacacaaagccaaatcaaaacttgattgtgccgtaaagttgactgtgaataagacgtattcacaatttcccctccattaatgagggcagacgcagtttatagggtcattgatacgcttccctcttttaattgtaccctgttcattttattgcacttcataataactccccctacatttgattgatatgatcttattatatatagactaaggattaaacttttactttttttataaaaatttgaccagattgcgaaacaaggaaaaacgttattcgcatttatctcaagtggcaaaatgaaacattagtttatattttcacatcacaattatcgataagcagtcagttattgtatttgtttaggataactgtggtaacctgaatataaccaacttaggaagaaggtgatcccatgccaaataaaagtaaacccaatagattaatcgctgaaaagtctccttatttactccaacacgcccacaaccctgtggactggttcccgtggggagaagaagcatttgcaaaagcaaaacgcgaaaacaagccggttctggtcagcatcggttattcgacgacttgtcattggtggcctaggataatcaaatcgtgtggaactccattaaaagataacagaagccattttaaacgataatactatttgttcaaacaatacagtctaccttttatttcattcattttctaaaacctgtaatccgtaaccacgcggtagcaggtttttttatttgcttgacttagagttaactctaaattgtaaactaactttaattaaatgagagggatgatgttgttgtattccattagtaaagctgctgagaagactagtattagttcgtatacattaagatattacgaaaagattgggttacttccaccaccaaaacgaaaaaacagtggaaggcgtttttatacggagactgatattcagttcatgttattcctgaaaagtttaaaggaaacaggtatgtctttggaggatattaatgagtttgtcaaagacggatgcattttggaaaaaatcaattcggatgttaaatcggcacaactctccccatctataaataaacgtattgagattttaaccaagcacttagagaaaatggaaattaaaaaaagggagctggaagaagtgatttctactacaaaaggaaaactggatacatatttttcaattttgaaagaggaagtggaaaacaaatgaaacatttaaatatatacataatgttacttggcttctctattttcacgggagctacttttaatcttgcaaaatatacagttggatatttttctccatcgtcttctgcggcatggcgtttcggtttagcggctgcagtgatgctcatcattttgatttttactgaaggtataaagaagagtcaattacggaaaaacgccgtttcatacattattcttggaattataggaatctttggatttaatgccttgttttttgttggtttaaaatatacatctcccgttaacggagcattaataatggggctgaatcctttattaacagcaattctcgctcgaattatcttaaaggacaacatgacaaaaaaacaagtactcggcatattctttgcattcatcggtgtattgttagtcattacacaaggttctatcgaaaccattaaaaccttatcaatttcaggaggagacttaataatctttacaggtaacgtttgttgggcactttatggcgtacttggacgtcggtttgtaaaggatggtacaccgctatctacaaccacttatacgatggttattggtgctgttagtttaatagtagtttccttatttacatccaaacctgtttctttatcgaacatcccgattggagtttggggggcaattgcttttatggctttctttacaagtgttttgggttacctatggtggaatcaggggattaaagagattggggctagtaaaacatctttatttttcaaccttgttcccgttgtaacgatgattatttcatttgccgttggaacaccaataaaggtatttcaagttattggggctgtgctagttatattaggcgttttaaccgcttcgggggtaatacgtattcctaagtacaatactaaagaacagtcagctatataaagaaatagggagtatttttgagaaaatgtgttaagttaaatatacactaattataggaagaaggtgatcccatgccaaacaaaagtaaacccaatagattaatcaatgagaaatcaccatatttactccaacacgcccacaaccctgtggactggttcccgtggggagaagaagcttttgaaaaagcaaaacgcgaaaacaagccggttctggtcagcatcggttattcgacttgtcattggtgccacgttatggctcacgaaagctttgaagacgaagaaatcgcgcgtcttctcaatgaacggtttgtggcgattaaagtcgaccgggaagagcggccggatgtggattctgtttatatgagaatctgccagctgatgaccgggcagggcggctggccgctgaatgtgtttatcacgcctgatcagaagccgttttacgcgggtacatattttccaaagacgagcaaattcaatcgtcccggttttgttgatgtgcttgagcatctgtctgagacgtttgcgaacgaccgtgagcatgtcgaggatattgcggagaacgccgctaaacatttgcagaccaaaacagccgccaaatcaggcgaaggccttagcgagtcagcgatttcccggacattccagcagcttgccagcgggtttgatacgatctacggcggtttcgggcaggcaccgaaatttccgatgccccatatgctgatgtatttgcttcgttatcatcacaatacggggcaggataacgctttatacaacgtgacgaaaacgctggacagcatggcgaatggcggcatttacgatcatatcggctatgggttcgcccgctattcgaccgatgacgagtggctcgttccccactttgaaaaaatgctgtacgacaatgcgctgctgctgactgcttatacagaagcctatcaggtcacgcaaaacagccgctataaagagatttgtgaacagatcattacgttcattcagagggaaatgactcatgaagacggaagctttttctctgctttagacgcggatacagaaggagaagaaggaaagtactacgtgtggtcaaaggaagaaattctgaaaacgctcggggacgatctcggaacgctgtattgccaagtgtatgacatcactgaagaaggaaactttgaaggcaaaaatattcctaacctcattcacacaaagtgggaacaaatcaaagccgatgccgggttaaccgaaaaagagctcagtctcaaactcgaagacgcaagacagcagctcttgaagacacgcgaggaaagaacctatccgcatgtcgatgataaagtgctcacctcatggaacgcgctgatgatcgcgggtcttgcgaaagcggcaaaggtataccaggagccgaaatatctcagcctagcgaaagacgccatcacatttattgaaaacaaattaatcatcgacggccgtgtgatggtccgatatcgtgatggcgaagtgaaaaacaaaggctttatcgacgattacgcttttctcctatgggcttatctggatctctatgaagcttcgtttgatctatcttttttacaaaaagcgaagaaactgacagacgatatgatcagcttattttgggatgaggagcatggcggattctacttcaccggacacgatgctgaggccttaatcgtccgggaaaaagaagtgtacgacggcgccgtgccttcaggaaacagtgtggcagctgttcagctgctgcgtcttggacaagtcacaggcgacttatcactgatcgaaaaagcggaaacaatgttttccgtgttcaagccagacatcgacgcgtatccgagcggccatgctttctttatgcaaagtgtgttaaggcatctgatgcctaaaaaagaaatcgtgatttttggaagtgcagacgatccagccagaaaacaaatcataacggagcttcaaaaagcctttaagcctaacgactccattctggtggcagagcagcccgagcaatgcaaagacattgcgccatttgcagcagactaccgcatcatagacggcaaaacaaccgtgtatatttgtgaaaacttcgcctgccagcagccgacaacgaatatcgaagaagccatccaaacgttaataagcagcagggattaagacccttgctgcttactttttgatttcttatggtaccataaagcgatccccgcaaacacaagattgaccgctatcgtaaagaaagcctcccacatcgggttcccccgcgtaaccgtaaagagagaaggaattcctccatacacactgtttttttctgtaataaacatacacaaaaacatattattcgcggcatgggcgccaagtgatatttcgatgcttccagttttaatcgtgtaataggtccacacaaaaccaaatgttaaatactcaattcctgcccagacagcgccattgttcatttctggattcgcaaaatgcaatacgccaaacaatcctccgacaatcagtgtcaaaaatagaggatttttcgtcaatctcccgaaagcttgaagcaaaaatcccctgaaaaacagttcctcagctgatgtctgaatcggaaccaaaatgagggcagccgctagcagccagataaagcgtgaggcattaaactcttgcattgaatagctatcaggatgaatcgcaaaatcaatcaattgtacggcgatcatcagcaagaaataagcaataaagccaaaggaaattctccgccaattcatctttgaatttggtgtaatcacagttcggaaaggccgcttcaaaataaagcgcacagccagccaaactcccggaatggcgaataaataaatcacatgggacaaataaagatctacgaggggatcactcagcacagcttcatccaaatcaaacgtgatattgggattcacaataaccgtgaacagtatagcgaaaaggtaagctatattcccgaatacatataaccctaccatcaccaaaaaagcgaaaaaatatctccacaacgtattgtttccttctataggacggataaatgaattcattccttctatgtctcttcctttcaatgagaatattactatatatttgcataaattggtctatgaatctactgttttggaaatcttttaagcaaaattaaaatataaagtgtgaatttagttcttccatctagtgatttgaactctgttgccaatgaaccaagatacttataatagtcctaagaggggaattttcagtcttttcttactactcaaaagggggttttttatgaatacgatcttcaaacaaaagaatacacatcctttctcaaacgcagcgaatcgtttagaccgccttccgatttcacgcgttcatttccaagtgttaaccgctctcggcattgtttatttctttgatctcgcagatttatttaccctcagcaatgtagcgccggcactgatcgagcattggggcatcccgctttcaactattgctaacgtaacggctgcttcgtttttaggcatgtttttaggcgcttcactgggcggacggctgtccgatcgaatcggccgcaaaaaagccttaaatctatttgtctttgttttttcaatcgcatcgctatgcaatgctgcggcatgggacattccatctttaatgacattccgttttctcaccggatttggcgttgcagccgccatggtcattacgaatagctatttggcggaatttttcccttcaagtgtacgtggaaaatatatttctttttgtgccatgattggattgatcggggttccgatcaccaacattgtgtctgcctttgtcattcctcttggttcatggggatggaggctagtatttgtatggggtgccgtcggccttatttattttttctttattcgacggctggaagagtcgcctcgctggcacgaaaatcgcggggaatatgcgaaagccgatgcgatcctcaaccgaattgaggcacaggttgaaaaggagaaaggcccgcttccggcagcatcccagcctaaagtaagcgaaactgttaagcagcatgcaggttacgccggcttattgaaaggcagaaacctcaaaatcaccatcgtattatctgctgtatggatttttgaaacgtttgggttttacggatttgcctcatgggttccaagcctgttaaaaagcaatggtgtcaccatggaaaatacattgtggtataacgtattgcattccgtcggcgctccgcttggcgcactgctcggctccatgatttctgaaagatttcaaagaaaatggattttagctgcgagtgcgtttctgacggccatcgccgggctcttatatggtatgacttttattcccatcatgatcattgtctttggttttatcgtgaatatcacagaacgggtctttacctcgaacttatacgcctatacatctgaaccttatccgactgaataccgctcgtctggcagcggtttagcctatggtcttggccgtttttcaaacatttttggctcattgcttgtcggatttattgccgttcagctcggctatatcagcgtcttcttatttattgggggctgctggctcgcatgctccttgctgttaatcttcttcggtcctaatacgaatgcgaaacagatttaaaaaagtcagtgcggatctgccgcactgatctcattacaattgcttcaaaatcctcgcggggtttccgcctacaacagtattagcgggtacatccttagtgacaacagatccagaagcaatcactgcgttatcaccgattgtcactcccgggttaatcaccgcccggcctccaatccaaacttgatctccaattgtcacaggcttaccgaactccttcccggatttcctttcgatcggatcaagaggatgaccggccgtgtagatatgtacacctggcgcaatcaaacaatgacggccgatacgcacctcacacacatctaaaatgacacagtcaaaattaacaaatgtatgatctccgatatgaatgtgatagccataatcacagcggaatgtcggcaaaatcgtgacttgatccccaaccgaaccgagcagctccttcaaaagctctgtccgcactatatcatcttccggtgtttcgttatattgtctaatcagctgtctcgcatgcttgcgttctagtaatagttgttgatcttccgaattgtataattctccggctgccattttttctttttctgtcctcagcatttaagtcactccatgtcagattgtaatctcgatcaaatttccttcatcatcctcaatcacactttcatagtagccgtctcctgttgtccgcgggccgttgacgacggcaaaaccatccgccttcaaccgagcagtcagttcatccactttctcccggctcccaacggaaaaggcaatatgtgcccagcctgtcattgtttgtgagggcggatcggtcacatttccttttttcataatctccagccttgctccggaaccaaacgtaataaaataagacttaaaatcttttttctcattatgatacaaatcattcgcttcgccattaaaatacgattcataaaaagacttcattcgctctaaatcattgacccagaccgctgtatgttcaatctgcatttcttcctcctccttcgccttcaatgaagttataaggtatgaaatgcatttcagttcaagcttttttcttaaatttatgctgaattttgatatcagcgggttcatcctgcaaaaatagagaaaatgctgcgatgccgagctgctcaagattcaaatcaagcgacggaaaaccaagaacacggctgatagaagtatttccctcgcctatgatttcaacatcccaattactctttttggcaaatagatgaattccagctgccacttcatcactatttgcataaatagcagtcggaaccctcccgctcatataaaaatgttcagctgcccgctcaccatcattcatatcgttgcatccggacagcatatggcggtcttccaaccttccgcagacagctttataggccgcagctttatcagccgtgctcgggctcctatcagcttctctgacacacgtaaaagcaatattctcatgcccgcggccctttaaatagcgaaagctctctgcataagcagcttttctgtcattaaaagcacaaggaacatcaatgtctccggtatcctcacaagcgatgatcggcccatattcctgataagctaaaatgctgtcccaatgattggcgcgggaagtaatgatgagaccgtctattttcttcgttcttaacagctctaaatatttgatttcaatatcggggttataattggtggggagaagggtcgttgcatactcatactgaaaagccgccttggtgattccgttaacgattttatcaaagcagggatgatcgctataaggcagaatcacaccgaccgtatgggttttcccgcgaatgagatcgattgcggttcgatttggcgtataatccaattccttcatgacttgatgaacaagctttctcttttcttcagatacataaggatggtgattcaatacacgcgagacagtcgaaacagatacatttgccagtcttgcgatctcttttatatttgccatctctttctccttttcatataaaaaaagcagtaagtgtaaaatccttactgctatctcatcatatattgatgataagttcaacaggacaatggtcggaacccatgacgtccgctgatatgcaggcatcttcaatctgttccttaagtctttcagaaacaacaaaataatcaatccgccatccgatatttctgtcccgggcgccggcacgatacgaccaccaggaataagcgccttcaagatcaggataaacatgacggaaagaatcaacaaagccagcttctaagaaacgagtgaatgcccctctttcttgatctgaaaatccagcgttattccggttcacctttggatttttcaaatcaatctcctgatgggctacattcaaatcaccgcataaaatcactggttttttctgatccaattcaagaatataagacaataaagcctcttcccattgcatgcggtaatcaatccgctctaatccccttctggaattgggcgtataaacagtcatcacatacacgttttcaaattccagcgtaatcactctgccttcttggtcatgctcttctactccgataccgtagatgacctgcagcggttcttgcttagaaaaaacagctgtgccggaatatccttttttcactgcataattccagtacacatgatagccttcaggctggagatcaacctggccgtcctgtatcttcgtttcctgaagacatataatatctgcatcctcttctttcaaataagagaggaaatccatttttctcatcacagcccgcaggccgtttacattccatgaaatcaacttcatgtttcatcctcccccctataaaaaagagcaagaacccgaaggtccttgctctttacgcatcagcttactcaccgcttacgtatggaagtaaagccatttgacgtgcgcgtttgatcgctgcagtcaatttacgttggtatttagcgtttgttccagttacacgacgtggtaaaattttaccgcgctcagaaacaaactttttaagaagatctacatctttgtagtcgatgtgcgtgataccgttagaagtgaaataacacactttacggcgtttcgcacgaccgcctctgcgtcctcctgccattgtcatttccctcctttctttttcattttaggcgataatcacattagaatggaagatcatcatccgagatgtcaatcggtttgccgtcgttggcaaatgggtcatcattaaagctgttcccctgattgcgtctctggttgttttgatttcccccaaatggattatcattttggcctccgccaaagtactggcctccgccgctgtttccttcgttgtatccacctgaaccagaaccgccgccgtttttcggctcaagaaattgaacactttcagcttggacctctgtcacgaagacacgctgtccttgctggttttcatagtttcttgtttgtaaacggccatctacgcctgcaaggcttccttttttcaagaagtttgcaacgttttcggcttgtcttctccaagtgacacaattaatgaaatcggcctcacgttctccggactggttcgtaaatgtacgattcacagcaagagtaaacgtagcaacagccgcaccgtttggcgtataacgaagctctgggtcttttgtcagtcttccgactaatacaactcggttaagcataagaaagaccaccttttaccattatatatttcaaaattgcttattcttcttctttaacaacaatgtggcgaatgatatcgtcactgatcttagctagacggtcaaattcttgaactgccgcagcgtcagattgaacgtttacgatttggtagaaaccgtcgcggaaatcgttgatttcgtaagcaagacgacgtttaccccaatcctttgttccagtgatctccgcaccgttagaagtcagaacgttgttgaaacgctcgataactgcttttttagactcttcgtcaatgtttgggcggataatgtacataacttcgtactttctcatctgtttgcacctccttttggactaagcggcccataatgggcaaggagcaataattctattactcacaattttatattataccaaagctcttgtccctttacaactgcatcctatacattaaatcggaaatgaataacatctccgtcttggaccacatattctttcccttcaaggcggacttttcctgcctctttagctcctgccataccgccgcccgcaagaagatcctcataagcaactgtctcagcacgaatgaagccccgctcaaagtcactatgaataattcctgcacactcaggtgctttcatgccttttttgaatgtccaagctctgacttcctgttctccggctgtgaaatatgttgcgaggccgagaagagagtaagacgctttgatcagctgatcaagacctgattcttgaatgcccagctcttccaagaacatttgcttttcttcgccttcaagctcagcgatttcagattcgatttttgcacatacaacgataacttctgcgttttcgccggcagcgtactcgcgaatcttcgctacattttcattgccagatggatcagcaacttcatcttcacttacgttggccacgtacaaaataggcttcgaagtcagtaaatggagctgcttcacaagcttttgctgctcctcagtgaattctacagatcgagcaggcttttcactctcaaacgcttctttcagtttagataaaatctcaaactcaaatacagcgtctttatctttttgcttcgcaagcttgctgacgcgtgtaatccgcttttcaaccgtttccatatcagcgaggatcagctcaaggttgatcgtttcaatgtcatcaatcggatcaacctttccggaaacgtgtgtaatgttgtcatcggaaaaagcacggacaacgtggcaaatcgcgtcaacttggcgaatatgagataggaacttgttgccgagtccttctcctttagatgcgccctttacaatccctgcaatatcagtgaattcaaaagcagtcggcacagtcttcttcgggttgaccagctcagtcagcttttgcagacgatcatccggcacctctacaattcccacgttcggatcaattgtacagaacgggtagttggctgattcggcaccggcctgtgtaattgcgttaaatagtgttgattttccgacgttcggcaaaccaacaattccagctgttaaagccattctttcatctcctctatataaaaccgtcattgtatgaacgtattttgaacctagagcaattataaggaggttcactggaaaagacaagctgacaaaaaagcattttcagcctgccaatccctttgattatgcttttttcaagcctactaaacagtcaaaaagcgtacttcccattccattatcagaatttgtatcatttgtcagtgcattgactgaccctccaaaagccgcccacatgccttcatctatattaatcgtcttcgcatgagcctgcttcatcactttcaccttgcccttcaagcgtccgcggtcattaaagataacaacttcgtctccattctgaagatcctgctcagccgctatatctggagaaatatcgacctgaacgtgctgaagcttttcaataaacggcacatgctgtgaatggttggaacgctgcggatgaatggataacagcgtataagggtacttttcagctaactcctcattatggaaaacagattcttcgggcacatttaattgaagcgagccgctaaatcctttttgctcagctagcgacgaagtaaattcaaattttccactcggcgtcaaaaactgataatcatcccacggcacctgttttactggaagagggaggtggcctttttcttttaaacgctcaagtgtcacatcctctgcttccaatgaagaaagccccatctctaaaaattcttgagtgctgtattcaaacagctcgccaaatccaaggcgttttgcaagctctgaccagatccagctgtccgacttcgcttcaccctgcggctccacaagcttcttcccgtactgaacataatgatgatacatactggaatagtagatatcttcttcttcaaaaacagtggcagtcggcaaaacataatcacacagctttgcggtatctgtcataatggaatcaatcgcaaccgtcatgggaaccttttcaaaagcttgtctcaccttatttgtattcggcacctgagtcagcggatttccgcacgtcacaataatcatctcaatcgcaggatcagcagcggtcaacacttcttcagcctgcgtcatcattgaaaaagaacgtgatgttgtttttaattccggcaacgtcagctttgtttttgcaaagctctcgccaatctggacatttccgaaattcgcgccgccgcccttaattccgacatttccgcttgccgcaacgagtgcatcaatccaacgaatcgttcccccgccgtttttatatcgctgcatgccaagccccataaaagtagacaccggaccatcagcatacaaaccggccagatactccagctcctccatagaagtttctgttttcacaataaactcttccagagaaacagttttcaaaagctctttcacatcatcaaaaccgacagaatgctcagaaataaacgtttcatccgttcttcccgtctcaatcagaaccttcaaaacggctgccgcaagccagccgtccattccaggctttacagagatatagcggtcagcaagcttagcagtcgggttgaagatcggatcaatcaccgtaatcgtggcgcccttctttttcacctgctgcaagtgatggtataagtgcatatttgttctggatacatttcttccccacacaacaacatgcttgctgttgtaaatatcaagcgggccgtgaccgtacgaacggccaaaatcccagctttgcgcctcgatgccggagccccagcatatgcttccgacgatttcagtcacgcctccatatccattaaaaaaacgctgatcaagcgcttttaacagaccgttattcgcataatcatggctgtgcaaaacagcagtcgtctccgacgtttccttgatttcccgaagtttatcggcaatttcatcaagtgcctgctcccaagaaatccgcacaaactcgccattttgttttttcattggatagcgaagccgatcaggcgaatttgtttttgtctcaagcattctgccgcggccgcagattttaccttccgtaatcggatggtttggatctccgtccacttttgttacctttccatcaacaacagtcaccaaaaagccgcagctgtcccaacaattcagcggacatgccgactgatgcactttgctcatcgccgtcttctccttaccttctatatgaaaaagcatgagtgtcggcctatttatgaagtaggctcctcatgcttgactagtactttttttagttttctttcaaattctcttctcggaatcataacactgtgagagcatccctcacacttaattcgaatatccattcccatgcgtataattttccagctgttcgctccgcatggatgcggttttttcatttctacgatatcattcaggccaaagtctttatccgccaagacccttcacctcttttcctaaactgctgtatctattgtacaaaaaaactgatcataagagcaatcaagatacccgaaaagaaatacatcctcttatttccatttactcaaaataggatataagagcagacaaactaacaaatacaaattgagcatcccatatatcggatacaagaacgcgatcaaatcagaaaatccgaaagaagtaaaaggcaccattaacactaacaaaatcaacacaatcacccatctcggcatatgaataaacgccatcagccggctggacagccccagcaaaccagctaccgtcgtcgtgtaaatcgccaggcacagcaccgccgtcatacataaaaaaaggaaataaggcgcaccctccagaacggcaaacagcggtatttcaaactgagaaagggagcccgccagctccaccaacgtttcattataaacaaatgagatcacgccaaaaataagaccgcttgccacacttgcgatttttgcttctccgagccctttcatctctttcccaacagaggataaaatcgcaacaactgaaaggatgtttaaagaggtaaacgtaatgctcgcaggccagttatactgctgggacaaatcaatcgtccacgtatggtgatgtgtgctctgaaaggagatcagcgcatataaaagccccgctactaacacaggaatcaaaatactatttatagataatattcctttcacatcccacaaaaacaaacacactgtcacgatgcaaatcagcgtgattccccaccagaaaggaagcttgtacatttgcagggtcacaccgcctccggcaatcatcaccatagtcgtcgaaaacaaataaaaaatgatgaggacatcataaattttcgccagccatggccccattaaatgctccagaaccggcagaaaatgagtggattgaactttaaaactgattttcatcacaatataagacgagaaaatgaacatgattgtaaacagcacaatagcaagtccgctttccgccccaaaaaactgccatatctcctgaccgctcgcataaccggccccgatcaggctccctaatatgagcagcatccacttcattccggctctccacaacactatcacctcatagacaaagttcagcttgtttccgttattgttactatataaataaaagaaagcaaacatgccatattttcatagacatttaaatacaaggtgaaattatcatacgaaatacacataaaaaaagactgctaatggaggcagtctaaaaatatatcatcttgcagtggaatgaaggaatgaacctcattaaccattcctatctataaagtgttttgtaagcaaaccgtagcttgatcatgatcgaggcaatgggggacaatatttataattcacccactaaccattcataataacctctacttttttaaaatctccggtgtcatacacaaagcataaaaaaccgtactgctggatatactgtaaacaaccttacataacgaaacacacaccatagcaattctgttacctactataacaaggaagtgaaacctatgaatcgaaaaggcgggcttttttcctctcaggaacgagtaaaacaatatgtttcacatacagatgcagctgcagcaaaacaaatccaaaccattctttcttcatccttacgtaaagctgccggcaaaccaattgttgtggtttgtatcggaacagaccgttcaaccggtgattcattgggcccactcgtaggaatgaaactcaaacagatgcagctcaccagattccatgtctacggaaccttatctgaccccgtccatgctgtgaacatgaaggataaaatcaatgacattcataaattacataaaaacccatttgttatagcggtcgatgcatgcttaggccgcgttaagagtgtgggttcatttcaaatcggggacgggccattaaagcccggagccggtgtacaaaaagaccttcctgaagtgggagatcttcatattaacggaatcgtgaatgttagcggtttcatggaatattttgtattgcaaaatacaagactcaacttggtcatgaatatggccaatgttctcgcggaaggattgagtttaacagatcggacagagtggaggcaagaacgccttaacccgttgcaaaggctcactgggcgcatataaaacaaaaaccatcttcgcttgaaagatggtttcttcatttacgattctcgttcagataaaagctctaaaatccggtcaaggtcttcattagagaaaaattcaatttcgattttgccttttttcttctgtcttttaatattaactgttgttccaaaataattttggaggtaggattcccgttcttttagaaccgcatctttcacaggttcttttttctttgtttcacgtggaacattctgattcaactgctgaatcagctgctcaagctggcgaacattgagctgctccgcaatcactttttgtaccagcggttcaagcttatttttgttttttaagccaagaagcgtgcgtccatgtcccatagaaagcgtaccttcggcaataagctgctgaatattttctggcagtgtcagcagtcttaaatgattcgcaatatgcggtctgcttttcccaagacgtttggcaagctgctcttgtgtgagatctaagtgtttcaacaaggaatcatatgcctgagcctcttcaagcggagataaatcttcacgctgaaggttttctaataaagcaatttccctcattaacgcctctgataattcacggacaatggccggaactgtatctaaacctgccagctttgccgctcgaaaacgccgttcacccgcaacaatatcatagccttttaaagattttctgacgataagcggctgaagaatgccatgctgcaacacagattcttttagttcagctaatgcctcgtcatcaaagtgttttcttggctgataaggattagggcgtaaatcggcaattttaatttcttcaactgtctcttcagacaaatctacctgattaaataacgcattaatcccttttccaaggcctttagccattcgcagccacttcctttgctaaatctaaatatacttccgcacctcttgaccgcggatcgtataaaatgatgggttttccgtgactcggtgcctcactcagacggacattacgcggaataactgtcttatatactttatccctaaaatactttttaacctcttcaatcacttgaatgccaaggtttgtccgggcatcaagcattgtcagcaatacaccttcaatcattaaatcagtattcaaatgcttttgcacaaggcgtactgtatttaataactggctgagaccctccaaggcataatattcgcactgtacaggaatcacaacggaatccgaggcagtaagggcattaatcgtcagcaagcccaatgacggcggacaatcaatgataatataatcataattttgctttactgcttcaagcgctctcttcaatctcacttctcttgatattgtaggaaccagctcgatctcagcccctgcaagctgaatcgtcgcaggaatcacatccaagttctctactgtcgttgctttaataatatctattacatctgcatcatctactaaaatatcgtacacacactgctctacatcggctttttcaatccctaatccgcttgtcgcatttccctgcggatcaatatctaccagcagaacccttttccctatgtaagccaaacatgccccaaggttgacagacgtcgttgttttgccgaccccgcctttttggttcgtaattgctatgatttttcccacgatgtcacctactttcacatgaacatgtactatcttgcttctattctatcaaaaaaagattaaagcgtttcatttttttcatcattttgttccgaatcagaagggaaataattgaaaattcaagcacgctttatgctttctcttataaattctgcaatttctatgtttttttgacttaaaaaaggaatttcttaaagaaaaaaagaagaagtcacggtacagaacgtggaaacaggatggtgagaaaatgatttatcaaacgaagagagatgtacccgttacgctgatgattgtgtttctcatattactgatacaagcagatgctattgttccttttgtgctgggaaatatgagagtttccggctggatcatttttattctgctgactcttttaaatggactcatcatttggagctttattgacctaaaatatgtattgaaggaacaccatctgatcattaaagccggattgatcaaacatcaaattccttatgaaaacatcgataaagtcgttcaaaaaaagaaactgtggtccggttttcgtctgatcggctctcgccatgccatcacaatatattatcaggggggatggggacatgcagtgatttcaccgcaaaaatctgaagaatttatccccaagctcaaagaaaagaattctaatataataatattcactaaaagtaagtgattaccttttatttaaaatataaaaagctctcctgcttttcaggagagcttctattttggtatgcgaatcgttaattgaatatattcttcaaattcttcttcttccgtattcaattttacaccgctgtcttccaccattgatagtgactggcgaatcgtgttcatcgcaattcttgtatctctgctgaatgctttgcgtctcggctttggctttctcttgccttgctccagcattttcaccacgcggtcttccgtctgctttacatttaaacttttctcaataatctctgtgagcagtgtgacttggagctcaggctgtttcagcggaatcagtgctctggcatggcgctcggtgattttcttctccataattgcctcttggaccggctgaggcagctttaataaccgaagcttattcgcgattgtagactgcccttttcctaagcgctgtgcgagtgcctcctgtgttaaatcatgcagctcaagtagcctagcataagcatgcgcttcctcaatagaagacagttcttcccgctgcaagttttcaattaacgccacagaagcggtttccgtgtcggaaaaatccttaataattgccggaatcttttcccactcaagcgattgcaccgctctccagcgtctttcacctgcaatgagttcgtattggccttcttcttctgtatgcctaacaacaatcggctgaataatgccgtgtgtatgaatggtcattgctaactctttgattttttcatctgagaaaatggtgcgtggctgaaaacggttgggaacgatagcatttaccggtatttccagaatctcttctttgtttgtatcatgttcagcaatctccggctccggttccttctcaccaagcccgaagaaacgagagaatgaatgcttcatgtacctacaccacctttaaaaactgccatttttataattctattttctcatggtttttcctgctgtacatccatcaattttgatgaaaatatgatggtattgtcatatcaggctgtctaaattacccttcaattggcgatttattaggagttcccggttttcttggatacttcttaggtgtattttttattttgcgtatcaccataatattacgatcgctttcttcaataggcagcttaaaagaatggatattctcaagttctcctccaagcgtcgtgattgcttttttgcctgcattcagttcttcttcagctgatgcggcttttaaagcaacaaataaaccgtttttcttcaccagaggcaagcaaagctcactcaaaacagataatctcgcaactgctcgcgctgtcacaatatcatagctttcacgcacgtctttccgttgcccgaacgtttcagctctgtcatggcagaatgttgtattctccaattgcaaagcctcagatagcttttctaaaaacgtgatccgtttattcagtgaatccacgattgtgacattgaggtgcggaaagcatatttttatcggcagacttggaaaacccgctcccgctccgacatcacaaatcgtgttcacctgattgaagtcgacataaaaagtagctgtaatggaatcataaaaatgctttaaatacacttcttttttctctgttattgaagtcagattgattttttcgttccattcaaccagcatgtcgtaatacagctcaaattgctccagctgacggggagaaagggagatccctttttccgccaaaccagaagtgaattcttcaatattcatgccgtcatcctttctattcggctatcttcgcaatgcgtccctgctctaaatacaccaatagaattgaaatgtccgccgggtttacaccggaaatgcgggaagcttgggcaacagacaaaggccgtacatttttcagtttttgacgcgcctcggtcgcaatccccttaattgcgtcataatcaattcgatctggaatttttttattttccatcttcttcagtttttccacttgctgaagagatttttcaatatatccttcatatttcacttggatttctacttgttctgccacgtcttgaggaactggcacttctggcggcgccagttttgtgactgtttcatagttcatttcaggacgcttcatcaagtctgtgccgcgaactccatctttcaattcgcttccgccaagagaacggatatattcttgattttccggagacggcttgataattacagaatgaagacgttttttctccgcctcgatcgccgcttttttcttctcaaaagccgcatagcgctcatcagaaatcaatccaatgcgatgtccgatttctgtcagacgcaaatcagcattgtcatggcgaagaagcaatctgtattccgcacgtgatgtcaaaagacgatatggctcattggttccttttgtcacaaggtcatcaatcagaacaccaatataggcgtcagaacggcttaaaatcacttcttcttttccaagcgcttttcgtcctgcattgattcccgccataatcccttgtcccgcagcttcttcataaccggaagttccgttaatttggcctgcagtgtaaaggtttgtgattttttttgtttcaagtgtcggccagagctgtgtcggtacgattgcatcatactcgatcgcatagccggctctcatcatttgcacgttttcaagtccaggaatcgttgcaagcattctttgctgtacgtcttctggaagacttgtagataaaccttggacatagacttcctgtgtatttctgccttccggctcaaggaagatttggtgacgcggtttatcattaaaacggacaactttgtcttcaatggatgggcagtatcttgggcccgtacctttgatcataccggaatacatcggtgaacggtgcaggttgctgtcaataatctcatgtgtctcagggcttgtatatgtcagccagcaagggagctgatctgtgatatattccactgtttcatatgagaaagcgcgaggcacatcgtcaccaggctgaatttccgttttgctgtaatcaatcgtgtcgcttttaacgcgaggcggcgtacctgttttaaaacgaacaaggtcaaaaccaagttcctccaaatgctcagaaagcttaatagaaggctgctggttatttgggccgcttgagtaagacagatcgccaagaataatacgtcctcttaaatatgtccctgtcgtcatgacaactgctttcgcacgataatgtgcaccggtttgtgtaataacgcctcggcattcgccgtcttcaacgatcagccgctccacaattccttgcagcaatgttaagtttggttctttttcaagcgtatttttcatttcgtgctgatattggaatttgtctgcttgcgcacgcaatgcacgaaccgcaggaccttttcctgtattcagcattctcatttgaatatgcgttttatcgatgtttcttcccatttctccgccgagcgcgtcaatttcgcggacgacaatcccttttgcggggccgccgacagacggattacatggcataaatgcaaccatatctaggttgatggtcaagacaagcgttttggcgccttggcgtgcagatgcgagggcagcctcaacaccggcatgcccggcgccaatcacaatcacatcgtattggcctgcttcataccccatgattctagttcctccttttattattttcctaaacagaattgtgaaaagagctgatcaattaagctttcgtggacagaatctccaatgatttcccctaaaagctcccagcatcttgtaaggtcaatttgcaccatgtcgatcgggacatcctgttcgatgccgctaagcgcatcttcaatggcgcgttttgcttgctgtaaaatagagatgtgacgtgtgttgctgacataagtcagatcaccgctttcaatggcacccgtgtagaacagtgattgaatcgcttcttccagatcattgatgccttcctcttttaaaagagatgtcgtaacaactggacgtccattggcaagctcacggacacgttcagtgtcaatcttcgcctcaaggtcagtcttattcaaaatcacgataacatccatgccctcaacggcttcaaaaagcttcacgtcttcatcagaaagctcttcactataattaagcacaagtaaaatcaggtccgcttcctttagaacctggcgagaacgttcaacaccgattcgctcaacaatatcctctgtttcacgaatacctgctgtatcaaccagacgaagcgggacgccccttacattcacgtattcctcaatcacatcccgtgtcgttccgggaatatcggttacaatggcttttgcctcatgaacgaggctgttcagaagagatgattttcctacgtttggccggccgataatgacggtagaaagaccttcacgtaagatttttccttgctcagaagtcctcagcagcgtctcaatttcctttttcacggcggttgccttttcgactaaaatctgatgcgtcatttcctctacatcatcatactccggataatcgatattcacctcaacatgggccagtgtttctaaaatctcactgcgcaaacggcgcaccaaagcagaaagacgcccttccatttgattcatagcaacgttcattgcccggtccgttttcgctctgattaagtccataaccgcttccgcctgtgaaagatcgattcggccgtttaaaaacgcacgtttcgtaaattcaccaggctctgccagtctcgctccctctcttaatgcaagctgaagcacttggttcacagtcacaattcccccgtgacagttaatctcaatgacatcttctcgtgtaaaagttctcggtgcttttaacactgataccattacttcctcaacgacacgatccgaaggtctgtctacgatatgaccataatgaatcgtatgtgattcgaccgagctgagtgttttccccttcggtcccttataaattttatctgcgatttgaatggcttctggtccgctcaaccgtacaatcgcaatcgcgccttctcccatcggtgtggaaattgccgcaattgtatccatgttgttcacctctctttacttatacttcatctatataaaaaaatttttattatgccaaaactaaaagataacatagtttggttcgaagtggaagatttgttatccacagaaatagaaattcgtcccttattactttaacttatccacatgtgaataacaattaattttatttcctgaacttcctttttatcaacaggatacacctaaaaagaaaaaacttaaacggcaaaaccttgatattactaggaaaagtagatttttcggatacaaaaaaaccgaaatccaatttttatcggacttcggttttatgctatcttttatgggaaataacgagatgacgattttcgccttcacccattgaatatgttttgatctggtggtttgcatatccagaaagagtatcgtgaataatttttctttcgctggacggcatgggctcaagctggatggattttttcgttttcaaaacctggtcagcaagcttgatggccagctggctcagtgtttcttttcttttcaaacgatagttttctgcatccaccgtcacatttttatattggcctggataacggttaagggcaagctgtgtcaaagtttcaagggcgtttaaggtttgtcctcttttcccaatcaacaatgctgccttttcacctgttatatgatatctcactgtctttttgctttcttgaacagtcacatcagacttcccggcaatggcttcggcaatcgtttgaagatataacttcgcttgctgaatcggatcaatcttttcaaccagctttacgatcgcaggctttttaccgaaaatgccgagaaaccctttgtttccctcttcaataacagtaatttctaccttatccttcgttaatcccagctcttgcaatccggactgtactgcttcatcgacatttcgccctgcagcagtcacattcctcactttttctttcctccggctttttgcggctcaggattttttttaatatcaggtcctttaatgaggaaagtttgcgcaatcataaacaagttaccaactacccaataaagagaaagagccgccgggaagttgatcgcaaatacgataatcataattggcataatccaaagcatcatcgccatttgcggattttgctgcgcattgccagccatcatcagtttttgctgaacaaatgtagcgacaccggcaacgataggaagaatatagtaaggatctttttctcctaagtcaaaccataagaagctatgctctgaaatcgcctgggttctcatgatcgcatgatagaatccaattaaaatcggcatctggatcaaaatcgggaaacatcccgccaatggattgacaccatgcttttggaataaagccattgtttcctgctgaagcttttgctgcgttttttgatcctttgagctgtatttttctttaagcttttgcatttccggctgtaaagcctgcatcgctttcgaacttctcagctgcttaatcatcagcggtaaaattaataaacgaattaaaatggtaactagaattattgaaagcccgtagttatctcccgtcaatttcgctacatacgtaatgagctcagacaatggatatactacgtacttgtcccagaaatgcggactatctgcagtgatcggctctttcacactcgagcatccagccaaaagcatgaatacgccaaccatacttaatagcaaccctattctccttttcaacaacatttcctcctataattaatctttacactcttttattgcaaagcatacttgtatgtattttagcatctttcagttttaaatggtgtctttttctgatcaaccagaaaggaagcgcttttaaaagttgtaagaaagcagtggtgatgcctactttgacgaagatttcttatataatgaagactttctgaatagatgctgcagactttttttcgtttcctcatatgtcagctggctcgccggttttctggcaataatgatgtaatccttttccttcagtctctctttctcctcaagaaaggcctgccgaatcaaacgtttgatccgatttcgcatcacagcattgccaatttttttgctgacggaaagcccgacacgcagttcatcattttcaggctgatcaagcgtatataagacaaactggcggtttgcaactgatgtcccatgtttaaacactttttgaaaatcttcatttttctttaaacgatttcgcttcttcaaatgactcactccgatactggctggcagaaacttttaaaatttattatgaacatgagatgcatctgaaccaggaagcatgccccggttcattacgcatcacatctatcttttcccataacgtgaaaaaagaccactgacattattcagtggcctaagctgataatacttttctgcctttgcggcgacggcgtgctaaaactagacgaccgttttttgaactcatacggcttctgaagccatgaactttgctgcgtttacggttattcggttggaatgttcttttcatttatgacacctccctcgaggaatagctgttaaagacagtcttacttattatatttgcgttacctattcattgtcaacttcactagtgcttttatttcttgcaaccataataggataccataccttttcaactttcgaaaccttattttttagattccttaattttacggaaaaaagacaaattcaaacaatttgcccctaaaatcacgcatgtggatatctttttcggctttttttagtatccacagaggttatcgacaacattttcacattaccaacccctgtggacaaggttttttcaacaggttgtccgctttgtggataagattgtgacaaccattgcaagctctcgtttattttggtattatatttgtgttttaactcttgattactaatcctacctttcctctttatccacaaagtgtggataagttgtggattgatttcacacagcttgtgtagaaggttgtccacaagttgtgaaatttgtcgaaaagctatttatctactatattatatgttttcaacatttaatgtgtacgaatggtaagcgccatttgctctttttttgtgttctataacagagaaagacgccattttctaagaaaaggagggacgtgccggaag

SEQ ID NO: 6 - protein, 663 aa, Bacillus subtilis
MRKLYHGACYYPELWDEETIQQDIDIMREVGVNVVRIGEFAWSVMEPEEGKIDVGFFKEIIARLYDSGIETIMCTPTPTPPIWFSHGRPERMHANEKREIMGHGSRQHACTNNPYFRKKAAIITTAIAKELGRLPGLIGWQLDNEFKCHVAECMCETCLRLWHDWLKNRYGVIERLNEAWGTDVWSETYQTFEQVPQPGPAPFLHHASLRTMYQLFSMEMIASFADEQAKIIRCYSDAPITHNGSVMFSVDNERMFQNLDFASYDTYASQENASAFLLNCDLWRNLKQGRPFWILETSPSYAASLESSAYPHADGYLQAEAVSSYALGSQGFCYWLWRQQRSGSEISHGSVLSAWGEPTIGYQKVLAVERARKEIEPIILSTEPVQAEAAMTYSDRAKAFIKTEPHRGLRHRSLVTHFYERILNTGIHRDLIPEGAPLDGYRLLFTPFVPYLSSEFIKKASAFAEAGGIWITGPLTGGRTCEHTIHTDCGLGELEKTSGIKTLFTFPMNENVNTGKAFGITAPLGLWSAVFDTESGNTLGTVESGPGAGHAFLTEQNYGEGKIVMLGSLPSGKEGDAMLEALVRHYAEEAVISSRSDVTPGTIVAPRKGENGLVWIVVNMDGKGGSVTLPEAGTDLLTHRLEKAGRLAVGPHEYRVIQFDNHS

SEQ ID NO: 7 - protein, 686 aa, Bacillus subtilis
MSKLEKTHVTEAKFMLHGGDYNPDQWLDRPDILADDIKLMKLSHTNTFSVGIFAWSALEPEEGVYQFEWLDDIFERIHSIGGRVILATPSGARPAWLSQTYPEVLRVNASRVKQLHGGRHNHCLTSKVYREKTRHINRLLAERYGHHPALLMWHISNEYGGDCHCDLCQHAFREWLKSKYDNSLKALNHAWWTPFWSHTFNDWSQIESPSPIGENGLHGLNLDWRRFVTDQTISFYKNEIIPLKELTPDIPITTNFMADTPDLIPYQGLDYSKFAKHVDVISWDAYPVWHNDWESTADLAMKVGFINDLYRSLKQQSFLLMECTPSAVNWHNVNKAKRPGMNLLSSMQMIAHGSDSVLYFQYRKSRGSSEKLHGAVVDHDNSPKNRVFQEVAKVGETLERLSEVVGTKRPAQTAILYDWENHWALEDAQGFAKATKRYPQTLQQHYRTFWEHDIPVDVITKEQDFSPYKLLIVPMLYLISEDTISRLKAFTADGGTLVMTYISGVVNEHDLTYTGGWHPDLQAIFGVEPLETDTLYPKDRNAVSYRSQIYEMKDYATVIDVKTASVEAVYQEDFYARTPAVTSHEYQQGKAYFIGARLEDQFQRDFYEGLITDLSLSPVFPVRHGKGVSVQARQDQDNDYIFVMNFTEEKQLVTFDQSVKDIMTGDILSGDLTMEKYEVRIVVNTH

SEQ ID NO: 8 - protein, 718 aa, Bacillus subtilis
MVSIRRSFEAYVDDMNIITVLIPAEQKEIMTPPFRLETETTVFPLAVREEYSLEAKYKYVCVSDHPVTFGKIHCVRASSGHKTDLQIGAVIRTAAFDDEFYYDGELGAVYTADHTVFKVWAPAATSAAVKLSHPNKSGRTFQMNRLEKGVYAVTVTGDLHGYEYLFCICNNLEWMETVDPYAKAVTVNGEKGVVLRPDQMKWTAPLKPFSHPVDAVIYETHLRDFSIHENSGMINKGKYLALTETDTQTANGSSSGLAYIKELGVTHVELQPVNDFAGVDEEKPLDAYNWGYNPLHFFAPEGSYASNPHDPQTRKTELKQMINTLHQHGLRVILDVVFNHVYKRENSPFEKTVPGYFFRHDECGMPSNGTGVGNDIASERRMARKFIADCVVYWLEEYNVDGFRFDLLGILDIDTVLYMKEKATKAKPGILLFGEGWDLATPLPHEQKAALANAPRMPGIGFFNDMFRDAVKGNTFHLKAAGFALGSSESAQAVMHGIAGSSGWKALAPIVPEPSQSINYVESHDNHTFWDKMSFALPQENDSRKRSRQRLAAAIILLAQGVPFIHSGQEFFRTKQGVENSYQSSDSINQLDWDRRETFKEDVHYIRRLISLRKAHPAFRLRSAADIRRHLECLTLKEHLIAYRLYDLDEVDEWKDIIVIHHASPDSVEWRLPNDIPYRLLCDPSGFQEDPAEIKKTVAVNGIGTVILYLASDLKSFA

SEQ ID NO: 9 - protein, 407 aa, Bacillus subtilis
MKLAFICTEKLPAPAVRGGAIQMMIDGVTPYFSSRYNLTIFSIEDPSLPKRETKDGVHYIHLPKEHYREAVAEELRASSFDLIHVFNRPLNVSLYKKASPNSKIVLSLHNEMFSEKKMTFAQGKEVLDNVSMITTVSEFIKQTVIERFPEAEDITKVVYSGVDLNSYPPVWTMKGSAVRKTYRKKYGIEDKKVILFAGRLSPIKGPHLLIHSMRRILQQHPDAVLVIAGGKWFSDDSENQYVTYLRTLALPYRDHIIFTKFIPADDIPNLFLMADVFVCSSQWNEPLARVNYEAMAAGTPLITTNRGGNGEVVKDEVTGLVIDSYNKPSSFAKAIDRAFTDQELMNKMTKSARKHVEALFTFTHAAKRLNTVYQSVLTPKNKQFPPPFLTQNFDLSSINQLFVKAKT

SEQ ID NO: 10 - protein, 377 aa, Bacillus subtilis
MKIALIATEKLPVPSVRGGAIQIYLEAVAPLIAKKHEVTVFSIKDPNLADREKVDGVHYVHLDEDRYEEAVGAELKKSRFDLVHVCNRPSWVPKLKKQAPDAVFILSVHNEMFAYDKISQAEGEICIDSVAQIVTVSDYIGQTITSRFPSARSKTKTVYSGVDLKTYHPRWTNEGQRAREEMRSELGLHGKKIVLFVGRLSKVKGPHILLQALPDIIEEHPDVMMVFIGSKWFGDNELNNYVKHLHTLGAMQKDHVTFIQFVKPKDIPRLYTMSDVFVCSSQWQEPLARVHYEAMAAGLPIITSNRGGNPEVIEEGKNGYIIHDFENPKQYAERINDLLSSSEKRERLGKYSRREAESNFGWQRVAENLLSVYEKNR

SEQ ID NO: 11 - protein, 351 aa, Bacillus subtilis
MYQKEHEEQIVSEILSYYPFHIDHVALKSNKSGRKIWEVETDHGPKLLKEAQMKPERMLFITQAHAHLQEKGLPIAPIHQTKNGGSCLGTDQVSYSLYDKVTGKEMIYYDAEQMKKVMSFAGHFHHASKGYVCTDESKKRSRLGKWHKLYRWKLQELEGNMQIAASYPDDVFSQTFLKHADKMLARGKEALQALDDSEYETWTKETLEHGGFCFQDFTLARLTEIEGEPFLKELHSITYDLPSRDLRILLNKVMVKLSVWDTDFMVALLAAYDAVYPLTEKQYEVLWIDLAFPHLFCAIGHKYYLKQKKTWSDEKYNWALQNMISVEESKDSFLDKLPELYKKIKAYREAN

SEQ ID NO: 12 - protein, 353 aa, Bacillus subtilis
MAENHEVIEEGNSSELPLSAEDAKKLTELAENVLQGWDVQAEKIDVIQGNQMALVWKVHTDSGAVCLKRIHRPEKKALFSIFAQDYLAKKGMNVPGILPNKKGSLYSKHGSFLFVVYDWIEGRPFELTVKQDLEFIMKGLADFHTASVGYQPPNGVPIFTKLGRWPNHYTKRCKQMETWKLMAEAEKEDPFSQLYLQEIDGFIEDGLRIKDRLLQSTYVPWTEQLKKSPNLCHQDYGTGNTLLGENEQIWVIDLDTVSFDLPIRDLRKMIIPLLDTTGVWDDETFHVMLNAYESRAPLTEEQKQVMFIDMLFPYELYDVIREKYVRKSALPKEELESAFEYERIKANALRQLI

SEQ ID NO: 13 - protein, 421 aa, Bacillus subtilis
MKMAKKCSVFMLCAAVSLSLAACGPKESSSAKSSSKGSELVVWEDKEKSIGIKDAVAAFEKEHDVKVKVVEKPYAKQIEDLRMDGPAGTGPDVLTMPGDQIGTAVTEGLLKELHVKKDVQSLYTDASIQSQMVDQKLYGLPKAVETTVLFYNKDLITEKELPKTLEEWYDYSKKTADGSNFGFLALFDQIYYAESVMSGYGGYIFGKDKDGSYNPSDIGINNEGAVKGAALIQKFYKDGLFPAGIIGEQGINVLESLFTEGKAAAIISGPWNVEAFSKAGINYGITKLPKLENRKNMSSFIGVKSYNVSAFTKNEELAQELAVFLANEKNSKTRYEETKEVPAVKSLANDPAIMKSEAARAVTEQSRFSEPTPNIPEMNEIWTPADSALQTVATGKADPKQALDQAAETAKGQIKAKHSGK

SEQ ID NO: 14 - protein, 131 aa, Bacillus subtilis
MTDTRHMYGGPGFGHYQGFGIGHPGYGMYGGHPGFGMYGGYPDHGIHGGVGGYPGYGTYGGYGGSGGYPSGGYGGSPGTVNYPNMHHENDGHHHYYHHHHDGKDNLHHHHHDGHYGHHHHHMGHWGKDGYK

SEQ ID NO: 15 - protein, 50 aa, Bacillus subtilis
MVRNKEKGFPYENENKFQGEPRAKDDYASKRADGSINQHPQERMRASGKR

SEQ ID NO: 16 - protein, 258 aa, Bacillus subtilis
MSFFKKLAASAGIGAAKVDTILEKDAYFPGEEVQGTVHVKGGKIAQDIRYIDLQLSTRYVIVKDDEEHRKYATIHSFRVTGSFTIQPGEEHQFPFTFTLPLDTPITVGKVEVAVVTDLDIQGGIDKSDHDRIFVEAHPWIENVLEAIENLGFRLNEADCEQAPYFQRRLPFVQEFEFVPTSGYYRQMLDELELIFLLDEDGLEIIFEVDRRARGLRGWLEEMYNDGEQLVRVRFSQSELEDTEELEEVLEEILDQYAE

SEQ ID NO: 17 - protein, 49 aa, Bacillus subtilis
MGFGYGFGGGYGGGCYGGYAGGYGGGYGSTFVLLVVLFILLIIVGASFF

SEQ ID NO: 18 - protein, 82 aa, Bacillus subtilis
MDYPLNEQSFEQITPYDERQPYYYPRPRPPFYPPYYYPRPYYPFYPFYPRPPYYYPRPRPPYYPWHGYGGGYGGGYGGGYGY

SEQ ID NO: 19 - protein, 337 aa, Bacillus subtilis
MKTITIAAKEAKELVRQKLASAGLNERDAEKVADVLVHADLRNVHSHGVLRTEHYVNRLLAGGINPGAQPVFKETGPVTGVLDGDDGFGHVNCDMAMDHAIDMAKKKGVGMVTAVNSSHCGALSYFVQKAADEKLIGIAMTHTDSIVVPFGGRTPFLGTNPIAYGVPAKHKKPFILDMATSKVAFGKILQAREEGKEIPEGWGVDENGEAVTDPDKVVSLSTFGGPKGYGLSIVVDVFSGLLAGAAFGPHIAKMYSGLDQKRKLGHYVCAINPAFFTDWDTFLEQMDAMIDELQQSPPAVGFERVYVPGEIEQLHEERNKKNGISIARSVYEFLKSR

SEQ ID NO: 20 - protein, 494 aa, Bacillus subtilis
MFTMDDLNQMDTQTLTDTLGSIFEHSSWIAERSAALRPFSSLSDLHRKMTGIVKAADRETQLDLIKKHPRLGTKKTMSDDSVREQQNAGLGKLEQQEYEEFLMLNEHYYDRFGFPFILAVKGKTKQDIHQALLARLESERETEFQQALIEIYRIARFRLADIITEKGETQMKRTMSYGKGNVFAYRTFLKPLTGVKQIPESSFAGRSNSVVGVDVTCEIGGEAFLPSFTDGDNTLVVATDSMKNFIQRHLASYEGTTTEGFLHYVAHRFLDTYSHMDKITLTGEDIPFEAMPAYEEKELSTSHLVFRRSRNERSRSVLKAERSGNTITITEQYSEIMDLQLVKVSGNSFVGFIRDEYTTLPEDGNRPLFVYLNISWQYENTNDSYASDPARYVAAEQVRDLASTVFHELETPSIQNLIYHIGCRILARFPQLTDVSFQSQNHTWDTVVEEIPGSKGKVYTEPRPPYGFQHFTVTREDAEKEKQKAAEKCRSLKA

SEQ ID NO: 21 - protein, 221 aa, Bacillus subtilis
MKKFVSILFMFGLVMGFSQFQSSTAFAADKVVHETIIVPKNTTYDGKGQRFVAGKELGDGSQSENQDPVFRVEDGATLKNVVLGAPAADGVHTYGNVNIQNVKWEDVGEDALTVKKEGKVTIDGGSAQKASDKIFQINKASTFTVKNFTADNGGKFIRQLGGSTFHVDVIIDKCTITNMKEAIFRTDSKTSTVRMTNTRYSNVGQKWIGVQHIYENNNTQF

SEQ ID NO: 22 - protein, 112 aa, Bacillus subtilis
MKKKKMSPLFRRLNYFSPIEHHSNKHSQTTREDRDWENVYRNRWQYDKVVRSTHGVNCTGSCSWNIYVKNGIVTWEGQNLNYPSTGPDMPDFEPRGCPRGPVFHGISTARSV

SEQ ID NO: 23 - protein, 43 aa, Bacillus subtilis
MKKAVIVENKGCATCSIGAACLVDGPIPDFEIAGATGLFGLWG

SEQ ID NO: 24 - protein, 448 aa, Bacillus subtilis
MFIEQMFPFINESVRVHQLPEGGVLEIDYLRDNVSISDFEYLDLNKTAYELCMRMDGQKTAEQILAEQCAVYDESPEDHKDWYYDMLNMLQNKQVIQLGNRASRHTITTSGSNEFPMPLHATFELTHRCNLKCAHCYLESSPEALGTVSIEQFKKTADMLFDNGVLTCEITGGEIFVHPNANEILDYVCKKFKKVAVLTNGTLMRKESLELLKAYKQKIIVGISLDSVNSEVHDSFRGRKGSFAQTCKTIKLLSDHGIFVRVAMSVFEKNMWEIHDMAQKVRDLGAKAFSYNWVDDFGRGRDIVHPTKDAEQHRKFMEYEQNVIDEFKDLIPIIPYERKRAANCGAGWKSIVISPFGEVRPCALFPKEFSLGNIFHDSYESIFNSPLVHKLWQAQAPRFSEHCMKDKCPFSGYCGGCYLKGLNSNKYHRKNICSWAKNEQLEDVVQLI

SEQ ID NO: 25 - protein, 53 aa, Bacillus subtilis
MSPAQRRILLYILSFIFVIGAVVYFVKSDYLFTLIFIAIAILFGMRARKADSR

SEQ ID NO: 26 - protein, 436 aa, Bacillus subtilis
MNNIIPIMSLLFKQLYSRQGKKDAIRIAAGLVILAVFEIGLIRQAGIDESVLRKTYIILALLLMNAYMVFLSVTSQWKESYMKLSCLLPISSRSFWLAQSVVLFVDTCLRRTLFFFILPLFLFGNGTLSGAQTLFWLGRFSFFTVYSIIFGVVLSNHFVKKKNLMFLLHAAIFACVCISAALMPAATLPLCAVHMLWAVIIDFPVFLQAPPQQSKMHSFMRRSEFSFYKREWNRFISSKAMLLNYAVMAAFSGFFSFQMMNTGIFNQQVVYIVISALLLICSPIALLYSIEKNDRMLLITLPIKRKTMFWAKYRFYSGLLAGGFLLVVMIVGFISGRPISVLTFLQCIELLLAGAFIRLTADEKRPSFSWQTEQQLWSGFSKYRSYLFCLPLFLATLAGTAVSLAVIPIAGLVIVYYLQKQDGGFFDTSKRERLGS
